(19) United States
(12) Patent Application Publication
(10) Pub. No.: US 2019/0290692 A1
(43) Pub. Date: Sep. 26, 2019

(54) HUMANIZED ANTI-MUC1* ANTIBODIES AND USE OF CLEAVAGE ENZYME

(71) Applicant: MINERVA BIOTECHNOLOGIES CORPORATION, Waltham, MA (US)

(72) Inventors: Cynthia Bamdad, Waltham, MA (US); Benoit Smagghe, Waltham, MA (US); Luke Deary, Waltham, MA (US)

(73) Assignee: MINERVA BIOTECHNOLOGIES CORPORATION, Waltham, MA (US)

(21) Appl. No.: 16/340,974

(22) PCT Filed: Oct. 11, 2017
(86) PCT No.: PCT/US17/56204

§ 371 Date: Apr. 10, 2019

Related U.S. Application Data
(60) Provisional application No. 62/555,950, filed on Sep. 8, 2017.
(60) Provisional application No. 62/487,999, filed on Apr. 20, 2017.
(60) Provisional application No. 62/462,667, filed on Feb. 23, 2017.
(60) Provisional application No. 62/461,170, filed on Feb. 20, 2017.
(60) Provisional application No. 62/406,878, filed on Oct. 11, 2016.

(51) Int. Cl. A61K 35/17; A61P 35/00; C12N 15/85; C07K 16/30; C07K 14/725; C12N 5/0783

(52) U.S. Cl. CPC A61K 35/17; A61P 35/00; C12N 15/85; C07K 16/3092; C07K 14/7051; C07K 2317/24; C07K 2317/622; C07K 2317/73; C07K 2319/03; C07K 2319/033; C12N 5/0638

(57) ABSTRACT

The present application discloses humanized antibodies and antibody like proteins and fragments thereof and use of cleavage enzyme.

### BACKGROUND OF THE INVENTION

### 1. Field of the Invention

[0001] The present application relates to humanized and non-human anti-MUC1* antibodies and methods of making and using them. The present application also relates to using an immune cell transfected or transduced with a cleavage enzyme for the treatment of cancer. The present invention also relates to using an immune cells transfected or transduced with a CAR and another protein for the treatment of cancer.

### 2. General Background and State of the Art

[0002] We previously discovered that a cleaved form of the MUC1 (SEQ ID NO:1) transmembrane protein is a growth factor receptor that drives the growth of over 75% of all human cancers. The cleaved form of MUC1, which we called MUC1* (pronounced muk 1 star), is a powerful growth factor receptor. Cleavage and release of the bulk of the extracellular domain of MUC1 unmasks a binding site for activating ligands dimeric NME1, NME6, NME7, NME7_{AB}, NME7-X1 or NME8. It is an ideal target for cancer drugs as it is aberrantly expressed on over 75% of all cancers and is likely overexpressed on an even higher percentage of metastatic cancers (Mahanta et al. (2008) A Minimal Fragment of MUC1 Mediates Growth of Cancer Cells. PLoS ONE 3(4): e2054. doi:10.1371/journal.pone.0002054; Fessler et al. (2009), “MUC1* is a determinant of trastuzumab (Herceptin) resistance in breast cancer cells,” Breast Cancer Res Treat. 118(1):113-124). After MUC1 cleavage most of its extracellular domain is shed from the cell surface. The remaining portion has a truncated extracellular domain that comprises most or all of the primary growth factor receptor sequence called PSMGFR (SEQ ID NO:2).

[0003] Antibodies are increasingly used to treat human diseases. Antibodies generated in non-human species have historically been used as therapeutics in humans, such as horse antibodies. More recently, antibodies are engineered or selected so that they contain mostly human sequences in order to avoid a generalized rejection of the foreign antibody. The process of engineering recognition fragments of a non-human antibody into a human antibody is generally called ‘humanizing’. The amount of non-human sequences that are used to replace the human antibody sequences determines whether they are called chimeric, humanized or fully human.

[0004] Alternative technologies exist that enable generation of humanized or fully human antibodies. These strategies involve screening libraries of human antibodies or antibody fragments and identifying those that bind to the target antigen, rather than immunizing an animal with the antigen. Another approach is to engineer the variable region(s) of an antibody into an antibody-like molecule. Another approach involves immunizing a humanized animal. The present invention is intended to also encompass these approaches for use with recognition fragments of antibodies that the inventors have determined bind to the extracellular domain of MUC1*.

[0005] In addition to treating patients with an antibody, cancer immunotherapies have recently been shown to be effective in the treatment of blood cancers. One cancer immunotherapy, called CAR T (chimeric antigen receptor T cell) therapy, engineers a T cell so that it expresses a chimeric receptor having an extra cellular domain that recognizes a tumor antigen, and a transmembrane and cytoplasmic tail of a T cell (Dai H, Wang Y, Lu X, Han W. (2016) Chimeric Antigen Receptors Modified T-Cells for Cancer Therapy. J Natl Cancer Inst. 108(7): djv439). Such receptor is composed of an single chain antibody fragment (scFv) that recognizes a tumor antigen, linked to a T cell transmembrane and signaling domains. Upon binding of the receptor to a cancer associated antigen, a signal is transmitted resulting in T-cell activation, propagation and the targeted killing of the cancer cells. In practice, a patient's T cells are isolated and transduced with a CAR, expanded and then injected back into the patient. When the patient's CAR T cells bind to the antigen on a cancer cell, the CAR T cells expand and attack the cancer cells. A drawback of this method is the risk of activating the patient's immune system to destroy cells bearing the target antigen, when most cancer antigens are expressed on some healthy tissues, but overexpressed on cancerous tissues. To minimize the risk of off-tumor/on-target effects, the cancer antigen should be minimally expressed on healthy tissues.

[0006] Another cancer immunotherapy involves BiTEs (Bi-specific T cell Engagers). The BiTE approach attempts to eliminate the CAR T associated risk of off-tumor/on-target effects. Unlike CAR T, BiTEs are bispecific antibodies that should not pose any greater risk than regular antibody-based therapies. However, unlike typical anti-cancer antibodies that bind to and block a cancer antigen, BiTEs are designed to bind to an antigen on the tumor cell and simultaneously bind to an antigen on an immune cell, such as a T cell. In this way, a BiTE recruits the T cell to the tumor. BiTEs are engineered proteins that simultaneously bind to a cancer associated antigen and a T-cell surface protein such as CD3-epsilon. BiTEs are antibodies made by genetically linking the scFv's of an antibody that binds to a T cell antigen, like anti-CD3-epsilon to a scFv of a therapeutic monoclonal antibody that binds to a cancer antigen (Patrick A. Baeuerle, and Carsten Reinhardt (2009) Bispecific T-cell engaging antibodies for cancer therapy. Cancer Res. 69(12):4941-4944).

### SUMMARY OF THE INVENTION

[0007] In one aspect, the present invention is directed to a non-human, human or humanized anti-MUC1* antibody or antibody fragment or antibody-like protein that binds to a region on extracellular domain of MUC1 isoform or cleavage product that is devoid of the tandem repeat domains. The non-human, human or humanized anti-MUC1* antibody or antibody fragment or antibody-like protein may specifically bind to

[0008] (i) PSMGFR region of MUC1;

[0009] (ii) PSMGFR peptide;

[0010] (iii) a peptide having amino acid sequence of SNIKFRPGSVVVQLTLAFREGTINVHDVETQFNQYKTEAASRY (SEQ ID NO:620);

[0011] (iv) a peptide having amino acid sequence of SVVVQLTLAFREGTINVHDVETQFNQYKTEAASRY (SEQ ID NO:621);

[0012] (v) a peptide having amino acid sequence of VQLTLAFREGTINVHDVETQFNQY (SEQ ID NO:622); or

[0013] (vi) a peptide having amino acid sequence of SNIKFRPGSVVVQLTLAFREGTIN (SEQ ID NO:623).

[0014] The non-human, human or humanized antibody may be IgG1, IgG2, IgG3, IgG4 or IgM. The human or humanized antibody fragment or antibody-like protein may be scFv or scFv-Fc.

[0015] The human or humanized antibody, antibody fragment or antibody-like protein as in above may comprise a heavy chain variable region and light chain variable region which is derived from mouse monoclonal MN-E6 antibody, and has at least 80%, 90% or 95% or 98% sequence identity to the mouse monoclonal MN-E6 antibody. The heavy chain variable region may have at least 90% or 95% or 98% sequence identity to SEQ ID NO:13 and the light chain variable region may have at least 90% or 95% or 98% sequence identity to SEQ ID NO:66.

[0016] The human or humanized antibody, antibody fragment or antibody-like protein according to above may include complementarity determining regions (CDRs) in the heavy chain variable region and light chain variable region having at least 90% or 95% or 98% sequence identity to CDR1, CDR2 or CDR3 regions having sequence as follows:

[0017] CDR1 heavy chain SEQ ID NO:17

[0018] CDR1 light chain SEQ ID NO:70,

[0019] CDR2 heavy chain SEQ ID NO:21

[0020] CDR2 light chain SEQ ID NO:74,

[0021] CDR3 heavy chain SEQ ID NO:25

[0022] CDR3 light chain SEQ ID NO:78.

[0023] The human or humanized antibody, antibody fragment or antibody-like protein described above may include a heavy chain variable region and light chain variable region which is derived from mouse monoclonal MN-C2 antibody, and has at least 80%, 90% or 95% or 98% sequence identity to the mouse monoclonal MN-C2 antibody. The heavy chain variable region may have at least 90% or 95% or 98% sequence identity to SEQ ID NO:119 and the light chain variable region has at least 90% or 95% or 98% sequence identity to SEQ ID NO:169. The complementarity determining regions (CDRs) in the heavy chain variable region and light chain variable region may have at least 90% or 95% or 98% sequence identity to CDR1, CDR2 or CDR3 regions having sequence as follows:

[0024] CDR1 heavy chain SEQ ID NO:123

[0025] CDR1 light chain SEQ ID NO: 173,

[0026] CDR2 heavy chain SEQ ID NO: 127

[0027] CDR2 light chain SEQ ID NO: 177,

[0028] CDR3 heavy chain SEQ ID NO:131

[0029] CDR3 light chain SEQ ID NO:181.

[0030] The human or humanized antibody, antibody fragment or antibody-like protein as in above may include a heavy chain variable region and light chain variable region which is derived from mouse monoclonal MN-C3 antibody, and may have at least 80%, 90% or 95% or 98% sequence identity to the mouse monoclonal MN-C3 antibody. The heavy chain variable region may have at least 90% or 95% or 98% sequence identity to SEQ ID NO:414 and the light chain variable region may have at least 90% or 95% or 98% sequence identity to SEQ ID NO:459. The complementarity determining regions (CDRs) in the heavy chain variable region and light chain variable region may have at least 90% or 95% or 98% sequence identity to CDR1, CDR2 or CDR3 regions having sequence as follows:

[0031] CDR1 heavy chain SEQ ID NO:418

[0032] CDR1 light chain SEQ ID NO:463,

[0033] CDR2 heavy chain SEQ ID NO:422

[0034] CDR2 light chain SEQ ID NO:467,

[0035] CDR3 heavy chain SEQ ID NO:426,

[0036] CDR3 light chain SEQ ID NO:471.

[0037] The human or humanized antibody, antibody fragment or antibody-like protein described above may include a heavy chain variable region and light chain variable region which is derived from mouse monoclonal MN-C8 antibody, and has at least 80%, 90% or 95% or 98% sequence identity to the mouse monoclonal MN-C8 antibody. The heavy chain variable region may have at least 90% or 95% or 98% sequence identity to SEQ ID NO:506 and the light chain variable region may have at least 90% or 95% or 98% sequence identity to SEQ ID NO:544. The complementarity determining regions (CDRs) in the heavy chain variable region and light chain variable region may have at least 90% or 95% or 98% sequence identity to CDR1, CDR2 or CDR3 regions having sequence as follows:

[0038] CDR1 heavy chain SEQ ID NO:508

[0039] CDR1 light chain SEQ ID NO:546,

[0040] CDR2 heavy chain SEQ ID NO:510

[0041] CDR2 light chain SEQ ID NO:548,

[0042] CDR3 heavy chain SEQ ID NO:512,

[0043] CDR3 light chain SEQ ID NO:550.

[0044] In another aspect, the present invention is directed to an anti-MUC1* extracellular domain antibody comprised of sequences of a humanized MN-E6 represented by humanized IgG2 heavy chain, or humanized IgG1 heavy chain, paired with humanized Kappa light chain, or humanized Lambda light chain. The humanized IgG2 heavy chain may be SEQ ID NOS:53, humanized IgG1 heavy chain may be SEQ ID NO:57, humanized Kappa light chain may be SEQ ID NO: 108, and humanized Lambda light chain may be SEQ ID NO: 112, or a sequence having 90%, 95% or 98% sequence identity thereof.

[0045] In another aspect, the invention is directed to an anti-MUC1* extracellular domain antibody comprised of sequences of a humanized MN-C2 represented by humanized IgG1 heavy chain, humanized IgG2 heavy chain, paired with humanized Lambda light chain, and humanized Kappa light chain. The humanized IgG1 heavy chain MN-C2 may be SEQ ID NOS:159 or IgG2 heavy chain may be SEQ ID NOS:164 paired with Lambda light chain (SEQ ID NO:219) or Kappa light chain (SEQ ID NO:213), or a sequence having 90%, 95% or 98% sequence identity thereof.

[0046] In another aspect, the invention is directed to an anti-MUC1* extracellular domain antibody comprised of sequences of a humanized MN-C3 represented by humanized IgG1 heavy chain or humanized IgG2 heavy chain paired with humanized Lambda light chain or humanized Kappa light chain. The humanized MN-C3 IgG1 heavy chain may be SEQ ID NOS:454, IgG2 heavy chain may be SEQ ID NOS:456, Lambda light chain may be SEQ ID NO:501, and Kappa light chain may be SEQ ID NO:503, or a sequence having 90%, 95% or 98% sequence identity thereof.

[0047] In another aspect, the invention is directed to an anti-MUC1* extracellular domain antibody comprised of sequences of a humanized MN-C8 represented by humanized IgG1 heavy chain or humanized IgG2 heavy chain paired with humanized Lambda light chain or humanized Kappa light chain. The humanized MN-C8 IgG1 heavy chain may be SEQ ID NOS:540, IgG2 heavy chain may be SEQ ID NOS:542, Lambda light chain may be SEQ ID NO:580 and Kappa light chain may be SEQ ID NO:582, or a sequence having 90%, 95% or 98% sequence identity thereof.

[0048] In another aspect, the invention is directed to a human or humanized anti-MUC1* antibody or antibody fragment or antibody-like protein according to above, which inhibits the binding of NME protein to MUC1*. The NME may be NME1, NME6, NME7AB, NME7-X1, NME7 or NME8.

[0049] In yet another aspect, the invention is directed to a single chain variable fragment (scFv) comprising a heavy and light chain variable regions connected via a linker, further comprising CDRs of antibodies that bind to MUC1* extracellular domain. The CDRs may be derived from MN-E6, MN-C2, MN-C3 or MN-C8 antibodies or humanized antibodies thereof. The scFv may be one that possesses the SEQ ID NOS:233, 235 and 237 (E6); SEQ ID NOS:239, 241, and 243 (C2); SEQ ID NOS:245, 247, and 249 (C3); or SEQ ID NOS:251, 253, and 255 (C8).

[0050] In still another aspect, the invention is directed to a chimeric antigen receptor (CAR) comprising a scFv or a humanized variable region that binds to the extracellular domain of a MUC1 that is devoid of tandem repeats, a linker molecule, a transmembrane domain and a cytoplasmic domain. The single chain antibody fragment may bind to

[0051] (i) PSMGFR region of MUC1,

[0052] (ii) PSMGFR peptide,

[0053] (iii) a peptide having amino acid sequence SNIKFRPGSVVVQLTLAFREGTINVHDVETQFNQYKTEAASRY (SEQ ID NO:620);

[0054] (iv) a peptide having amino acid sequence of SVVVQLTLAFREGTINVHDVETQFNQYKTEAASRY (SEQ ID NO:621);

[0055] (v) a peptide having amino acid sequence of VQLTLAFREGTINVHDVETQFNQY (SEQ ID NO:622); or

[0056] (vi) a peptide having amino acid sequence of SNIKFRPGSVVVQLTLAFREGTIN (SEQ ID NO:623).

[0057] In the CAR as described above, portions of any of the variable regions set forth and described above, or combination thereof may be used in the extracellular domain of the CAR. The CAR also comprises a transmembrane region and a cytoplasmic tail that comprises sequence motifs that signal immune system activation. The extracellular domain may be comprised of non-human, or humanized single chain antibody fragments of an MN-E6 scFv, MN-C2 scFv, MN-C3 scFv or MN-C8 scFv.

[0058] In the CAR as described above, the extracellular domain may include a non-human or humanized single chain antibody fragments of an MN-E6 scFv set forth as SEQ ID NOS: 233, 235, or 237), MN-C2 scFv (SEQ ID NOS:239, 241, or 243), MN-C3 scFv (SEQ ID NOS: 245, 247, or 249) or MN-C8 scFv (SEQ ID NOS:251, 253, or 255).

[0059] In any of the CARs described above, the cytoplasmic tail may be comprised of one or more of signaling sequence motifs CD3-zeta, CD27, CD28, 4-1BB, OX40, CD30, CD40, ICAm-1, LFA-1, ICOS, CD2, CD5, or CD7.

[0060] In any of the CARs described above, the sequence may be CARMN-E6 CD3z (SEQ ID NOS:295), CARMN-E6 CD28/CD3z (SEQ ID NOS:298); CARMN-E6 4-1BB/CD3z (SEQ ID NOS:301); CARMN-E6 OX40/CD3z (SEQ ID NOS:617); CARMN-E6 CD28/4-1BB/CD3z (SEQ ID NOS:304); CARMN-E6 CD28/OX40/CD3z (SEQ ID NOS:619); CAR MN-C2 CD3z (SEQ ID NOS:607); CAR MN-C2 CD28/CD3z (SEQ ID NOS:609); CAR MN-C2 4-1BB/CD3z (SEQ ID NOS:611 and SEQ ID NOS: 719); CAR MN-C2 OX40/CD3z (SEQ ID NOS:613); CAR MN-C2 CD28/4-1BB/CD3z (SEQ ID NOS: 307); CAR MN-C2 CD28/OX40/CD3z (SEQ ID NOS:615) or CAR MN-C3 4-1BB/CD3z (SEQ ID NOS: 601).

[0061] In another aspect, the CAR may have an extracellular domain unit that recognizes a peptide. The peptide may be PSMGFR (SEQ ID NO:2). The peptide may be a peptide derived from NME7. The peptide may be

[0062] NME7A peptide 1 (A domain): MLSRKEALDFHVDHQS (SEQ ID NO:7);

[0063] NME7A peptide 2 (A domain): SGVARTDASES (SEQ ID NO:8);

[0064] NME7B peptide 1 (B domain): DAGFEISAMQMFNMDRVNVE (SEQ ID NO:9);

[0065] NME7B peptide 2 (B domain): EVYKGVVTEYHDMVTE (SEQ ID NO:10); or

[0066] NME7B peptide 3 (B domain): AIFGKTKIQNAVHCTDLPEDGLLEVQYFF (SEQ ID NO:11).

[0067] In another aspect, the invention is directed to a composition that includes at least two CARs with different extracellular domain units transfected into the same cell.

[0068] The at least two CARs may have one CAR that does not have a tumor antigen targeting recognition unit and the other CAR does have a tumor antigen targeting recognition unit. In another aspect of the invention, one of the extracellular domain recognition units may bind to MUC1* extracellular domain. In another aspect of the invention, one of the extracellular domain recognition units may be an antibody fragment and the other is a peptide, which may be devoid of transmembrane and signaling motifs; the peptide may be a single chain antibody fragment. In another aspect of the invention, one of the recognition units may bind PD-1 or PDL-1. In another aspect of the invention, one extra cellular domain recognition unit is an anti-MUC1* scFv chosen from the group consisting of scFv of MN-E6 antibody, scFv of MN-C2 antibody, scFv of MN-C3 antibody or scFv of MN-C8 antibody and the other is a peptide derived from NME7 or chosen from the group consisting of

[0069] NME7A peptide 1 (A domain): MLSRKEALDFHVDHQS (SEQ ID NO:7);

[0070] NME7A peptide 2 (A domain): SGVARTDASES (SEQ ID NO:8);

[0071] NME7B peptide 1 (B domain): DAGFEISAMQMFNMDRVNVE (SEQ ID NO:9);

[0072] NME7B peptide 2 (B domain): EVYKGVVTEYHDMVTE (SEQ ID NO:10); and

[0073] NME7B peptide 3 (B domain): AIFGKTKIQNAVHCTDLPEDGLLEVQYFF (SEQ ID NO:11).

[0074] In another aspect, the invention is directed to a cell comprising a CAR with an extracellular domain that binds to the extra cellular domain of a MUC1 molecule that is devoid of tandem repeats. In another aspect, the invention is directed to a cell comprising a CAR with an extracellular domain that binds to a MUC1* transfected or transduced cell. The cell that includes the CAR may be an immune system cell, preferably a T cell, a natural killer cell (NK), a dendritic cell or mast cell.

[0075] In another aspect, the invention is directed to an engineered antibody-like protein.

[0076] In another aspect, the invention is directed to a method of screening a library of antibodies or antibody fragments that are human, for those that bind to

[0077] (i) PSMGFR peptide;

[0078] (ii) a peptide having amino acid sequence SNIKFRPGSVVVQLTLAFREGTINVHDVETQFNQYKTEAASRY (SEQ ID NO:620);

[0079] (iii) a peptide having amino acid sequence of SVVVQLTLAFREGTINVHDVETQFNQYKTEAASRY (SEQ ID NO:621);

[0080] (iv) a peptide having amino acid sequence of VQLTLAFREGTINVHDVETQFNQY (SEQ ID NO:622);

[0081] (v) a peptide having amino acid sequence of SNIKFRPGSVVVQLTLAFREGTIN (SEQ ID NO:623);

[0082] (vi) NME7 protein; or

[0083] (vii) a peptide fragment of NME7 protein.

[0084] In another aspect, the invention is directed to a method for treating a disease in a subject comprising administering an antibody according to any claim above, to a person suffering from the disease, wherein the subject expresses MUC1 aberrantly. The disease may be cancer, such as breast cancer, ovarian cancer, lung cancer, colon cancer, gastric cancer or esophageal cancer.

[0085] In another aspect, the invention is directed to a method for treating a disease in a subject comprising administering an NME peptide, to a person suffering from the disease, wherein the subject expresses MUC1 aberrantly.

[0086] In another aspect, the invention is directed to a method of proliferating or expanding stem cell population comprising contacting the cells with the antibody according to any method or composition described above.

[0087] In another aspect, the invention is directed to a method of facilitating stem cell attachment to a surface comprising coating the surface with a humanized MN-C3 or MN-C8 antibody, antibody fragment or single chain antibody thereof and contacting stem cell to the surface.

[0088] In another aspect, the invention is directed to a method of delivering stem cell in vitro or in vivo comprising the steps of coating a surface with a humanized MN-C3 or MN-C8 antibody, antibody fragment or single chain antibody thereof, contacting the stem cell to the surface and delivering the stem cell to a specific location.

[0089] In another aspect, the invention is directed to a method of isolating stem cell comprising the steps of coating a surface with a humanized MN-C3 or MN-C8 antibody, antibody fragment or single chain antibody thereof, and contacting a mixed population of cells to the surface and isolating stem cell.

[0090] In another aspect, the invention is directed to a scFv comprising variable domain fragments derived from an antibody that binds to an extracellular domain of MUC1 isoform or cleavage product that is devoid of the tandem repeat domains. The variable domain fragments may be derived from mouse monoclonal antibody MN-E6 (SEQ ID NO:13 and 66) or from the humanized MN-E6 (SEQ ID NO: 39 and 94), or from MN-E6 scFv (SEQ ID NO: 233, 235 and 237). Or, the variable domain fragments may be derived from mouse monoclonal antibody MN-C2 (SEQ ID NO: 119 and 169) or from the humanized MN-C2 (SEQ ID NO: 145 and 195), or from MN-C2 scFv (SEQ ID NO: 239, 241 and 243). Or, the variable domain fragments may be derived from mouse monoclonal antibody MN-C3 (SEQ ID NO: 414 and 459) or from the humanized MN-C3 (SEQ ID NO: 440 and 487), or from MN-C3 scFv (SEQ ID NO: 245, 247 and 249). Or, the variable domain fragments may be derived from mouse monoclonal antibody MN-C8 (SEQ ID NO: 505 and 544) or from the humanized MN-C8 (SEQ ID NO: 526 and 566), or from MN-C8 scFv (SEQ ID NO: 251, 253, 255).

[0091] In another aspect, the invention is directed to a method for the treatment of a person diagnosed with, suspected of having or at risk of developing a MUC1 or MUC1* positive cancer involving administering to the person an effective amount of the scFv described above.

[0092] In another aspect, the invention is directed to a scFv-Fc construct comprising the scFv as described above. The scFv-Fc may be dimerized. The Fc component may be mutated so that scFv-Fc is monomeric. The mutation may include mutating or deleting hinge region on Fc, making F405Q, Y407R, T366W/L368W, or T364R/L368R mutation or combinations thereof on the Fc represented by SEQ ID NO: 281, 279, 285 and 287.

[0093] In another aspect, the invention is directed to a polypeptide comprising at least two different scFv sequences, wherein one of the scFv sequences is a sequence that binds to extracellular domain of MUC1 isoform or cleavage product that is devoid of the tandem repeat domains. The polypeptide may bind to

[0094] (i) PSMGFR region of MUC1;

[0095] (ii) PSMGFR peptide;

[0096] (iii) a peptide having amino acid sequence of SNIKFRPGSVVVQLTLAFREGTINVHDVETQFNQYKTEAASRY (SEQ ID NO:620);

[0097] (iv) a peptide having amino acid sequence of VQLTLAFREGTINVHDVETQFNQYKTEAASRY (SEQ ID NO:621);

[0098] (v) a peptide having amino acid sequence of VQLTLAFREGTINVHDVETQFNQY (SEQ ID NO:622); or

[0099] (vi) a peptide having amino acid sequence of SNIKFRPGSVVVQLTLAFREGTIN (SEQ ID NO:623).

[0100] The polypeptide may bind to a receptor on an immune cell, such as T cell, and in particular, CD3 on T-cell.

[0101] In another aspect, the invention is directed to a method of detecting presence of a cell that expresses MUC1* aberrantly, comprising contacting a sample of cells with the scFv-Fc described above and detecting for the presence of the binding of scFv-Fc to the cell. The cell may be cancer cell.

[0102] In another aspect, the invention is directed to a method for testing a subject's cancer for suitability of treatment with a composition comprising portions of the variable regions of MN-E6, MN-C2, MN-C3 or MN-C8, comprising the steps of contacting a bodily specimen from the patient with the corresponding MN-E6 scFv-Fc, MN-C2 scFv-Fc, MN-C3 scFv-Fc or MN-C8 scFv-Fc.

[0103] In another aspect, the invention is directed to a method of treating a subject suffering from a disease comprising, exposing T cells from the subject to MUC1* peptides wherein through various rounds of maturation, T cells develop MUC1* specific receptors, creating adapted T cells, and expanding and administering the adapted T cells to the donor patient who is diagnosed with, suspected of having, or is at risk of developing a MUC1* positive cancer.

[0104] In one aspect, the invention may be directed to an immune cell transfected or transduced with a cleavage enzyme for the treatment of cancer. The cancer may be a MUC1 positive cancer. The immune cell may be a T cell. The immune cell may be derived from the patient to be treated. The cleavage enzyme may be an MMP or ADAM family member. The cleavage enzyme may be MMP2, MMP9, MMP3, MMP14, ADAM17, ADAM28, or ADAM TS16.

[0105] In another aspect, the invention may be directed to an immune cell transfected or transduced with a CAR wherein its extra cellular domain comprises an antibody scFv that binds to the extra cellular domain of a MUC1 molecule that is devoid of the tandem repeats.

[0106] In another aspect, the invention may be directed to an immune cell transfected or transduced with a cleavage enzyme for the treatment of cancer. The cancer may be a MUC1 positive cancer. The immune cell may be a T cell. The immune cell may be an NK cell. The cleavage enzyme may be any enzyme that cleaves MUC1 such that the tandem repeat domain is separated from the transmembrane domain. Such cleavage enzymes include but are not limited to MMP1, MMP2, MMP3, MMP7, MMP8, MMP9, MMP11, MMP12, MMP13, MMP14, MMP16, ADAM9, ADAM10, ADAM17, ADAM 19, ADAMTS16, ADAM28 or a catalytically active fragment thereof. The immune cell may be further transfected or transduced with an activator of the cleavage enzyme. The cleavage enzyme may be without limitation, MMP2 or MMP9 or ADAM17, and the activator of cleavage enzymes MMP2 and MMP9 may be MMP14 and MMP3, respectively. The nucleic acid encoding the cleavage enzyme may be linked to an inducible promoter. The expression of the cleavage enzyme may be induced by an event that occurs specifically when the immune cell mounts an immune response to a target tumor cell. In one aspect of the invention, the cleavage enzyme cleaves MUC1 such that the cleavage product is recognized by an antibody that specifically recognizes cleaved MUC1 on cancerous tissues. In one aspect, the antibody that specifically recognizes cleaved MUC1 on cancerous tissues would bind to cancerous tissues at least two-times more than it binds to healthy tissues where T cells normally traffic.

[0107] In another aspect, the invention may be directed to an immune cell transfected or transduced with a CAR comprising an antibody fragment, and a cleavage enzyme for the treatment of cancer. The cancer may be a MUC1 positive cancer. The immune cell may be a T cell. The antibody fragment of the CAR on the T cell may direct the cell to a MUC1* positive tumor. The antibody fragment of the CAR on the T cell may recognize a form of MUC1 after it is cleaved by that specific cleavage enzyme. The antibody fragment of the CAR may be derived from MNC2 or MNE6 and the cleavage enzyme may be MMP9, MMP2, or ADAM17 or an activated form of MMP9, MMP2 or ADAM17. The immune cell may be further transfected or transduced with an activator of the cleavage enzyme. The cleavage enzyme maybe MMP2 or MMP9 or ADAM17, and an activator of cleavage enzymes MMP2 and MMP9 may be MMP14 and MMP3, respectively. The nucleic acid encoding the cleavage enzyme may be linked to an inducible promoter. The expression of the cleavage enzyme may be induced by an event that occurs specifically when the immune cell mounts an immune response to a target tumor cell. The antibody fragment may recognize a form of MUC1 or MUC1* that is created when the cleavage enzyme cleaves MUC1 or MUC1*. Expression of the cleavage enzyme by the inducible promoter may be induced when the antibody fragment of the CAR engages or binds to a MUC1 or MUC1* on the tumor.

[0108] In another aspect, the invention is directed to a method of treating cancer in a patient comprising administering to the patient the immune cell of any of the above, in combination with a checkpoint inhibitor.

[0109] These and other objects of the invention will be more fully understood from the following description of the invention, the referenced drawings attached hereto and the claims appended hereto.

### BRIEF DESCRIPTION OF THE DRAWINGS

[0110] The present invention will become more fully understood from the detailed description given herein below, and the accompanying drawings which are given by way of illustration only, and thus are not limitative of the present invention, and wherein;

[0111] FIGS. 1A-1D show cell growth assay graphs of MUC1* positive cells treated with either bivalent ‘bv’ anti-MUC1* antibody, monovalent ‘my’ or Fab, NM23-H1 dimers or NME7-AB. Bivalent anti-MUC1* antibodies stimulate growth of cancer cells whereas the monovalent Fab inhibits growth (A, B). Classic bell-shaped curve indicates ligand induced dimerization stimulates growth. Dimeric NM23-H1, aka NME1, stimulates growth of MUC1* positive cancer cells but siRNA to suppress MUC1 expression eliminate its effect (C). NME7-AB also stimulates the growth of MUC1* positive cells (D).

[0112] FIGS. 2A-2F show results of ELISA assays. MUC1* peptides PSMGFR, PSMGFR minus 10 amino acids from the N-terminus aka N-10, or PSMGFR minus 10 amino acids from the C-terminus, aka C-10 are immobilized on the plate and the following are assayed for binding: NME7-AB (A), MN-C2 monoclonal antibody (B), MN-E6 monoclonal antibody (C), or dimeric NME1 (D). These assays show that NME1, NME7-AB and monoclonal antibodies MN-C2 and MN-E6 all require the first membrane proximal 10 amino acids of the MUC1* extracellular domain to bind. MUC1* peptides PSMGFR minus 10 amino acids from the N-terminus aka N-10, or PSMGFR minus 10 amino acids from the C-terminus, aka C-10, are immobilized on the plate and the following are assayed for binding: MN-C3 (E) and MN-C8 (F).

[0113] FIGS. 3A-3C show results of competitive ELISA assays. The PSMGFR MUC1* peptide is immobilized on the plate and dimeric NM23-H1, aka NME1, is added either alone or after the MN-E6 antibody has been added (A). The same experiment was performed wherein NM23-H7, NME7-AB, is added alone or after MN-E6 has been added (B). Results show that MN-E6 competitively inhibits the binding of MUC1* activating ligands NME1 and NME7. In a similar experiment (C), PSMGFR or PSMGFR minus 10 amino acids from the N-terminus, aka N-10, is immobilized on the plate. Dimeric NM23-H1 is then added. Anti-MUC1* antibodies MN-E6, MN-C2, MN-C3 or MN-C8 are then tested for their ability to compete off the NM23-H1. Results show that although all three antibodies bind to the PSMGFR peptides, MN-E6 and MN-C2 competitively inhibit binding of the MUC1* activating ligands.

[0114] FIGS. 4A-4F show FACS scans of anti-MUC1* antibodies binding specifically to MUC1* positive cancer cells and MUC1* transfected cells but not MUC1* or MUC1 negative cells. ZR-75-1, aka 1500, MUC1* positive breast cancer cells were stained with 1:2 or 1:10 dilutions of the 1.5 ug/ml humanized MN-C2. After two washes, cells were stained with secondary antibody, Anti-Penta-His antibody at conjugated to Alexa 488 (Qiagen) dilutions of 1:200 (A), 1:50 (B), or 1:10 (C) to detect the 6× His tag on the huMN-C2 scFv. Flow cytometric analysis revealed a concentration-dependent shift of a subset of cells, indicating specific binding, which is unseen in the absence of the MN-C2 scFv (A-C). In another case, MN-E6 was used to stain MUC1 negative HCT-116 colon cancer cells transfected with the empty vector, single cell clone #8 (D), HCT-116 colon cancer cells transfected with MUC1* single cell clone #10 (E), or ZR-75-1, aka 1500, MUC1* positive breast cancer cells. As the FACS scans show, both MN-C2 and MN-E6 only stain MUC1* positive cells and not MUC1 or MUC1* negative cells.

[0115] FIG. 5 shows a graph of an ELISA in which surface is coated with either the MUC1* PSMGFR peptide or a control peptide. Humanized MN-C2 scFv is then incubated with the surface, washed and detected according to standard methods. The ELISA shows that the huMN-C2 scFv binds to the MUC1* peptide with an EC-50 of about 333 nM.

[0116] FIGS. 6A-6B show graphs of cancer cell growth inhibition by MUC1* antibody variable region fragment humanized MN-C2 scFv. hMN-C2 scFv potently inhibited the growth of ZR-75-1, aka 1500, MUC1* positive breast cancer cells (A) and T47D MUC1* positive breast cancer cells (B) with approximately the same EC-50 as the in vitro ELISAs.

[0117] FIGS. 7A-7B show graphs of tumor growth in immune compromised mice that have been implanted with human tumors then treated with anti-MUC1* antibody MN-E6 Fab or mock treatment. Female nu/nu mice implanted with 90-day estrogen pellets were implanted with 6 million T47D human breast cancer cells that had been mixed 50/50 with Matrigel. Mice bearing tumors that were at least 150 mm³ and had three successive increases in tumor volume were selected for treatment. Animals were injected sub cutaneously twice per week with 80 mg/kg MN-E6 Fab and an equal number of mice fitting the same selection criteria were injected with vehicle alone (A). Male NOD/SCID mice were implanted with 6 million DU-145 human prostate cancer cells that had been mixed 50/50 with Matrigel. Mice bearing tumors that were at least 150 mm³ and had three successive increases in tumor volume were selected for treatment. Animals were injected sub-cutaneously every 48 hours with 160 mg/kg MN-E6 Fab and an equal number of mice fitting the same selection criteria were injected with vehicle alone (B). Tumors were measured independently by two researchers twice per week and recorded. Statistics were blindly calculated by independent statistician, giving a P value of 0.0001 for each. Anti-MUC1* Fab inhibited breast cancer growth and prostate cancer growth. Treatment had no effect on weight, bone marrow cell type or number.

[0118] FIG. 8 is a graph of an ELISA assay showing differing levels of expression of humanized MN-E6 anti-MUC1* antibody depending on whether the light chain was kappa or lambda and whether the variable portion was fused to a human IgG or IgG2.

[0119] FIG. 9 is a graph of an ELISA assay comparing the binding of the parent mouse MN-E6 antibody to the humanized versions of the MN-E6 antibody to a surface presenting the PSMGFR peptide derived from the MUC1* extracellular domain.

[0120] FIG. 10 is a graph of an ELISA assay showing differing levels of expression of humanized MN-C2 anti-MUC1* antibody depending on whether the light chain was kappa or lambda and whether the variable portion was fused to a human IgG or IgG2.

[0121] FIG. 11 is a graph of an ELISA assay comparing the binding of the parent mouse MN-C2 antibody to the humanized versions of the MN-C2 antibody to a surface presenting the PSMGFR peptide derived from the MUC1* extracellular domain.

[0122] FIG. 12 is a graph of an ELISA assay showing binding of humanized single chain (scFv) MN-C2 and MN-E6 antibodies binding to a surface presenting the PSMGFR peptide derived from the MUC1* extracellular domain.

[0123] FIGS. 13A-13C show FPLC traces of the purification of MN-E6 scFv-Fc fusion protein that was grown in low IgG FBS over a Protein A affinity column. A) is the trace of the flow through. B) is the trace of the elution. C) shows the purified protein on a reducing or non-reducing gel.

[0124] FIGS. 14A-14B show photographs of SDS-PAGE characterization of purified MN-E6 scFv-Fc fusion proteins on a non-reducing gels, wherein the Fc portion that was fused to the MN-E6 was either wild type (wt) or mutated as follows: A) F405Q, Y407R, T394D; B) T366W/L368W, T364R/L368R, T366W/L368W or T364R/L368R. Fc mutants F405Q, Y407R, T366W/L368W, T364R/L368R, T366W/L368W and T364R/L368R all favored monomer over dimer formation. The reference construct amino acid sequence for the indicated mutations is SEQ ID NO:273.

[0125] FIGS. 15A-15B show FPLC traces of the purification of MN-E6 scFv-Fc Y407Q fusion protein that was grown in low IgG FBS over a Protein A affinity column. A) is the trace of the flow through. B) is the trace of the elution. The protein was further purified by size exclusion over an S200 column (C). (D) is a photograph of an SDS-PAGE gel showing which fractions had a predominance of monomer. The reference construct amino acid sequence for the indicated mutations is SEQ ID NO:273.

[0126] FIG. 16 shows a photograph of SDS-PAGE characterization of purified MN-E6 scFv-Fc-mutant fusion proteins on a non-reducing gel, wherein the Fc portion that was fused to the MN-E6 scFv was either wild type (wt) or mutated by elimination of the hinge region, ‘DHinge’, of the Fc or elimination of the hinge region of the Fc and also bearing the Y407R mutation. All the Fc mutants favored monomer over dimer formation. The reference construct amino acid sequence for the indicated mutations is SEQ ID NO:273.

[0127] FIGS. 17A-17C. A and B show photograph of non-reducing SDS-PAGE characterization of large scale expression and purification of MN-E6 scFv-Fc hingeless mutant, showing that it is a monomer. FPLC characterization and purification of MN-E6 scFv-Fc hingeless mutant is shown (C).

[0128] FIGS. 18A-18C show photographs of the SDS-PAGE characterization of the purified MN-C3 scFv-Fc fusion protein on a non-reducing gel (A) or a reducing gel (B). The protein was purified by size exclusion. The FPLC trace is shown (C).

[0129] FIGS. 19A-19B show photographs of Native gels of MN-C3 or MN-E6 Fabs, scFv, scFv-Fc, wherein the Fc portion is wild type or mutants that prefer or are exclusively monomers. Native gels show that the Y407R Fc mutation (A) and the double mutant Y407R and a deleted hinge (B) favor monomer over dimer the best. Note that proteins are loaded onto a gel at much higher concentrations than typical use concentrations. The dimer formation of other Fc mutants may only reflect the fact that loading concentration is very high.

[0130] FIG. 20 shows a graph of an ELISA wherein the surface was immobilized with either PSMGFR peptide, PSMGFR minus 10 amino acids from the N-terminus or minus 10 amino acids from the C-terminus. The hu MN-E6 scFv-Fc bound to the PSMGFR peptide and to the PSMGFR N-10 peptide but not to the PSMGFR C-10 peptide. The parent MN-E6 antibody and the humanized MN-E6 require the C-terminal 10 amino acids of PSMGFR for binding.

[0131] FIGS. 21A-21B show an ELISA graph of several anti-MUC1* scFv-Fc fusion proteins wherein the Fc region has been eliminated or mutated. Shown are hu MN-E6 scFv-Fc-wt, hu MN-E6 scFv-Fc-Y407R, hu MN-E6 scFv-Fc-hingeless, and hu MN-E6 scFv-Fc- Y407R-hingeless. All mutants bind to the PSMGFR peptide of the MUC1* extracellular domain (A). An ELISA graph of several anti-MUC1* scFv-Fc fusion proteins wherein the Fc region is either wild type or mutated. Shown are hu MN-E6 scFv-Fc-wt, hu MN-E6 scFv-Fc-hingeless, and hu MN-C3 scFv-Fc is shown (B). All bind to the PSMGFR peptide of the MUC1* extracellular domain.

[0132] FIGS. 22A-22C show graphs of ELISAs wherein the assay plate surface was immobilized with either PSMGFR peptide, PSMGFR minus 10 amino acids from the N-terminus or minus 10 amino acids from the C-terminus. The MN-C3 antibody variants were then assayed for binding to the various MUC1* peptides. A) Purified mouse monoclonal MN-C3 antibody; B) Impure humanized MN-C3 antibody; and C) the humanized MN-C3 scFv-Fc. ELISAs show binding to the PSMGFR peptide as well as to certain deletion peptides.

[0133] FIG. 23 shows a graph of an ELISA assay that quantifies the binding of humanized MN-E6 scFv-Fc-delta hinge, aka Dhinge or hingeless, and humanized MN-E6 scFv to the MUC1* peptide PSMGFR.

[0134] FIG. 24 shows photographs of immunofluorescence experiments in which humanized MN-C2 scFv or MN-E6 scFv specifically binds to MUC1* positive breast cancer cells in an identical concentration dependent manner. A-G: hu MN-C2 scFv binding to T47D breast cancer cells at concentrations indicated. H—N shows the fluorescently labeled scFv and DAPI. O-U: hu MN-E6 scFv binding to T47D breast cancer cells at concentrations indicated. V-B′ shows the fluorescently labeled scFv and DAPI. C′ is the secondary antibody control.

[0135] FIGS. 25A-25L show photographs of 1500 MUC1* positive breast cancer cells that have been cultured in normal medium or in the presence of humanized MN-E6 scFv. A-D are bright field images taken at 4× magnification. E-H are calcein fluorescent images taken at 4× magnification. I-L are calcein fluorescent images taken at 10× magnification. A, E, I show control cells cultured in normal RPMI medium. B, F, J show control cells cultured in normal RPMI medium plus a volume of PBS equal to the volume of MN-E6 scFv in PBS that is added to experimental wells. C, G, K show cells cultured in normal RPMI medium plus 500 ug/mL MN-E6 scFv. D, H, L show cells cultured in normal RPMI medium plus 5 ug/mL MN-E6 scFv. The photographs show killing and/or growth inhibition of MUC1* positive cells by MN-E6 scFv at 5 ug/mL and an even greater effect at 500 ug/mL. Images were taken at 96 hours post addition of test molecule.

[0136] FIGS. 26A-26L show photographs of 1500 MUC1* positive breast cancer cells that have been cultured in normal medium or in the presence of humanized MN-E6 scFv-Fc Dhinge, which is a hingeless or delta hinge mutant. A-F are bright field images taken at 20× magnification. G-L are calcein fluorescent images taken at 4× magnification. A, G show control cells cultured in normal RPMI medium. B, H show cells cultured in normal RPMI medium plus 100 ug/mL hMN-E6 scFv-Fc Dhinge. C, I show cells cultured in normal RPMI medium plus 50 ug/mL hMN-E6 scFv-Fc Dhinge. D, J show cells cultured in normal RPMI medium plus 5 ug/mL hMN-E6 scFv-Fc Dhinge. E, K show cells cultured in normal RPMI medium plus 0.5 ug/mL hMN-E6 scFv-Fc Dhinge. F, L show cells cultured in normal RPMI medium plus 500 ug/mL of MN-E6 Fab. The photographs show killing and/or growth inhibition of MUC1* positive cells by hMN-E6 scFv-Fc Dhinge 5 ug/mL, an even greater effect at 50 ug/mL and yet an even greater effect at 100 ug/mL. Comparing cell morphology to the control cells, cancer cells grown in MN-E6 Fab or in an effective amount of hMN-E6 scFv-Fc Dhinge, show rounding up of the cells which morphology change occurs before cell death. Images were taken at 96 hours post addition of test molecule.

[0137] FIG. 27 shows a graph of the image analysis of the fluorescent images of FIGS. 25 and 26. Image J was used to quantify the number of cells remaining after 96 hours treatment in humanized MN-E6scFv or MN-E6 scFv-Fc-delta hinge, aka Dhinge. The analysis software uses pixel counting and pixel fluorescence intensity to quantify the number of cells in each photograph. Analysis was performed over the entire image 512×512 pixels, 8-bit image. For comparison, the inhibition of mouse monoclonal MN-E6 Fab is also analyzed.

[0138] FIGS. 28A-28C show schematics of CAR sequence components.

[0139] FIG. 29 is a graph of an experiment measuring IL-2 cytokine secretion by Jurkat T cells that were transduced with a panel of CARs, including MN-E6-CD8-3z, MN-E6-CD8-CD28-3z, MN-E6-CD8-41BB-3z, MN-E6-CD4-CD28-3z and MN-E6-CD4-CD28-41BB-3z, when the CAR T cells were exposed to K562-wt cells or K562 cells that had been transfected with MUC1*.

[0140] FIG. 30 is a graph of an experiment measuring IL-2 cytokine secretion by Jurkat T cells that were transduced with a panel of CARs, including MN-E6-CD8-CD28-3z, MN-E6-CD8-41BB-3z, MN-E6-CD4-CD28-3z and MN-E6-CD4-41BB-3z, when the CAR T cells were exposed to K562-wt cells or K562 cells that had been transfected with MUC1*.

[0141] FIG. 31 is a graph of an experiment measuring IL-2 cytokine secretion by primary human T cells, isolated from a blood sample, that were transduced with a panel of CARs, including MN-E6-CD8-CD28-3z, MN-E6-CD8-41BB-3z and MN-E6-CD4-41BB-3z, when the CAR T cells were exposed to K562-wt cells or K562 cells that had been transfected with MUC1*.

[0142] FIG. 32 is a graph of an experiment measuring interferon-gamma (IFN-g) cytokine secretion by primary human T cells, isolated from a blood sample, that were transduced with a panel of CARs, including MN-E6-CD8-CD28-3z and MN-E6-CD4-41BB-3z, when the CAR T cells were exposed to K562-wt cells or K562 cells that had been transfected with MUC1*.

[0143] FIG. 33 is a graph of an experiment measuring interferon-gamma (IFN-g) cytokine secretion by primary human T cells, isolated from a blood sample, that were transduced with a panel of CARs, including MN-E6-CD8-CD28-3z, MN-E6-CD8-41BB-3z and MN-E6-CD8-CD28-41BB-3z, when the CAR T cells were exposed to K562-wt cells, K562 cells that had been transfected with MUC1*, or MUC1* positive cancer cells of prostate cancer, breast cancer or pancreatic cancer.

[0144] FIG. 34 is a graph of an experiment measuring target cell death when primary human T cells, isolated from a blood sample, that were transduced with a panel of CARs, including MN-E6-CD8-CD28-3z, MN-E6-CD8-41BB-3z and MN-E6-CD4-41BB-3z, when the CAR T cells were exposed to K562-wt cells or K562 cells that had been transfected with MUC1*. The ratio of T cells to target cells was 1:1 and the cells were co-cultured for 24 hours.

[0145] FIGS. 35A-35B are graphs of FACS measuring a time course of target cell survival from Day 1 to Day 3. Primary human T cells, isolated from a blood sample, were transduced with a panel of CARs, including humanized MN-E6-CD8-3z, MN-E6-CD8-CD28-3z, MN-E6-CD8-41BB-3z and MN-E6-CD8-CD28-41BB-3z. The CAR T cells were then exposed to K562-wt cells that naturally express low levels of MUC1*, or K562 cells that had been transfected with MUC1* high. The ratio of MUC1* targeting CAR T cells to target cells was either 1:1, 10:1, or 20:1. Surviving cells were detected and measured at Day 1 (A) or Day 3 (B).

[0146] FIG. 36 is a graph of FACS measurements of target cell survival at Day 3 of co-culture experiment. Primary human T cells were transduced with a panel of CARs, including humanized MN-E6-CD8-3z, MN-E6-CD8-CD28-3z, MN-E6-CD8-41BB-3z and MN-E6-CD8-CD28-41BB-3z. The CAR T cells were then exposed to MUC1* positive T47D breast cancer cells or MUC1* positive 1500 aka ZR-75-1 breast cancer cells. The ratio of MUC1* targeting CAR T cells to target cells was either 1:1 or 10:1. As can be seen from the graph, T cells transduced with a MUC1* targeting CAR have a much greater killing effect on MUC1* cancer cells than the untransduced control T cells. In addition, the killing effect is much greater when the ratio of T cells:target cells is increased.

[0147] FIG. 37 is a graph of FACS measurements of target cell survival at Day 1 of co-culture experiment. Primary human T cells were transduced with a panel of CARs, including humanized MN-E6-CD8-41BB-3z, MN-E6-CD4-41BB-3z, and MN-E6-CD8-CD28-41BB-3z. The CAR T cells were then exposed to the following MUC1* positive cancer cells: T47D breast cancer; capan2 pancreatic cancer; or DU-145 prostate cancer. The ratio of MUC1* targeting CAR T cells to target cells was 5:1. As can be seen from the graph, T cells transduced with a MUC1* targeting CAR have a much greater killing effect on MUC1* cancer cells than the untransduced control T cells. Note that the measurements were taken after 24 hours with only a 5:1 T cell to target cell ratio. Also note that MUC1* targeting CARs that have a CD4 extracellular domain-transmembrane-cytoplasmic tail work equally well as CD8 constructs.

[0148] FIG. 38 is a graph of FACS measurements of target cell survival at Day 3 of co-culture experiment. Primary human T cells were transduced with a panel of CARs, including humanized MN-E6-CD8-41BB-3z, MN-E6-CD4-41BB-3z, and MN-E6-CD8-CD28-41BB-3z. The CAR T cells were then exposed to the following MUC1* positive cancer cells: K562 leukemia cells transfected with MUC1*; T47D breast cancer; 1500 aka ZR-75-1 breast cancer cells; or CAPAN-2 pancreatic cancer cells. In addition to the untransduced T cell controls, the assay was performed on PC3 MUC1* negative prostate cancer cells. The ratio of MUC1* targeting CAR T cells to target cells was 1:1. As can be seen from the graph, T cells transduced with a MUC1* targeting CAR have a much greater killing effect on MUC1* cancer cells than the untransduced control T cells. In addition, the killing effect is specific for MUC1* positive cells. Note that MUC1* targeting CARs that have a CD4 extracellular domain-transmembrane-cytoplasmic tail work equally well as CD8 constructs.

[0149] FIG. 39 is a graph of FACS measurements of CAR T cell expansion over 24 hours in co-culture with target cells at a ratio of 5:1 CAR T cells to target cells. The primary human T cells were transduced with a panel of CARs, including humanized MN-E6-CD8-41BB-3z, MN-E6-CD4-41BB-3z, and MN-E6-CD8-CD28-41BB-3z. The CAR T cells were co-cultured with MUC1* positive T47D breast cancer cells, MUC1* positive Capan pancreatic cancer cells, and MUC1-negative cells HCT-116 colon cancer cells and HEK-293 human embryonic kidney cells. As can be seen from the graph, the CAR T population is increased in the presence of MUC1* positive cells.

[0150] FIG. 40 shows a photograph of a Western blot of MUC1* targeting CARs. From 1 to 9 are: 1. E6scFv-Fc-8-41BB-CD3z (Human Fc as hinge region with CD8 TM); 2: E6scFv-FcH-8-41BB-CD3z (Human Fc hingeless as hinge region with CD8 TM) 3: E6scFv-Fc-4-41BB-CD3z (Human Fc as hinge region with CD4 TM) 4: E6scFv-FcH-4-41BB-CD3z (Human Fc as hingeless hinge region with CD4 TM) 5: E6scFv-IgD-8-41BB-CD3z (hinge region from human IgD with CD8 TM) 6: E6scFv-IgD-4-41BB-CD3z (hinge region from human IgD with CD4 TM) 7: E6scFv-X4-8-41BB-CD3z (Long flexible linker as hinge region with CD8 TM) 8: E6scFv-X4-4-41BB-CD3z (Long flexible linker as hinge region with CD4 TM) 9: E6scFv-8-4-41BB-CD3z (Hinge region from CD8 and CD4 a with CD4 TM).

[0151] FIG. 41 shows graphs of FACS scans of T47D breast cancer cells co-cultured with human T cells that were transduced with MN- E6scFv-Fc-8-41BB-CD3z, MN-E6scFv-FcH-8-41BB-CD3z, MN-E6scFv-Fc-4-41BB-CD3z, MN-E6scFv-IgD-8-41BB-CD3z, MN-E6scFv-X4-8-41BB-CD3z and MN-E6scFv-X4-4-41BB-CD3z. T cells and cancer cells were co-cultured at a 1:1 ratio for 48 hours. T cell counts were normalized to an average of all untransduced T cells and target cells were normalized to each specific cell type when co-cultured with untransduced T cells. The graph shows that when the CAR T cells are co-cultured with MUC1* positive cancer cells, the T cell population expands and the targeted cancer cell population decreases.

[0152] FIG. 42 shows graphs of FACS scans of T47D breast cancer cells, Capan-2 pancreatic cancer cells, K562-MUC1* transfected cells, and K562-wt cells that were co-cultured with human T cells that were transduced with MN- E6scFv-Fc-8-41BB-CD3z, MN-E6scFv-FcH-8-41BB-CD3z, MN-E6scFv-Fc-4-41 BB-CD3z, MN-E6scFv-IgD-8-41BB-CD3z, MN-E6scFv-X4-8-41BB-CD3z and MN-E6scFv-X4-4-41BB-CD3z. T cells and cancer cells were co-cultured at a 1:1 ratio for 48 hours. T cell counts were normalized to an average of all untransduced T cells and target cells were normalized to each specific cell type when co-cultured with untransduced T cells. The graph shows that when the CAR T cells are co-cultured with MUC1* positive cancer cells, the T cell population expands and the targeted cancer cell population decreases.

[0153] FIGS. 43A-43J. A,B are photographs of breast cancer tissue arrays. A) was stained with VU4H5 which recognizes MUC1-FL (full length); B) was stained with mouse monoclonal antibody MN-C2 which recognizes cancerous MUC1*. Following automated staining (Clarient Diagnostics), the tissue staining was scored using Allred scoring method which combines an intensity score and a distribution score. C,D,E,F are color coded graphs showing the score calculated for MUC1 full-length staining for each patient's tissue. G,H,I,J are color coded graphs showing the score calculated for MUC1* staining for each patient's tissue.

[0154] FIGS. 44A-44J. A,B are photographs of breast cancer tissue arrays. A) was stained with VU4H5 which recognizes MUC1-FL (full length); B) was stained with mouse monoclonal antibody MN-C2 which recognizes cancerous MUC1*. Following automated staining (Clarient Diagnostics), the tissue staining was scored using Allred scoring method which combines an intensity score and a distribution score. C,D,E,F are color coded graphs showing the score calculated for MUC1 full-length staining for each patient's tissue. G,H,I,J are color coded graphs showing the score calculated for MUC1* staining for each patient's tissue.

[0155] FIGS. 45A-45H show photographs of normal breast and breast cancer tissues stained with humanized MN-E6-scFv-Fc biotinylated anti-MUC1* antibody at 2.5 ug/mL, then stained with a secondary streptavidin HRP antibody. A) is a normal breast tissue. B-D are breast cancer tissues from patients as denoted in the figure. E-H are photographs of the corresponding serial sections that were stained with the secondary antibody alone.

[0156] FIGS. 46A-46F show photographs of normal breast and breast cancer tissues stained with humanized MN-E6-scFv-Fc biotinylated anti-MUC1* antibody at 2.5 ug/mL, then stained with a secondary streptavidin HRP antibody. A) is a normal breast tissue. B-C are breast cancer tissues from patients as denoted in the figure. D-F are photographs of the corresponding serial sections that were stained with the secondary antibody alone.

[0157] FIGS. 47A-47H show photographs of breast cancer tissues stained with MN-E6 anti-MUC1* antibody at 10 ug/mL, then stained with a rabbit anti mouse secondary HRP antibody. A-D are breast cancer tissues from patient #300. E-H are breast cancer tissues from metastatic patient #291.

[0158] FIGS. 48A-48F show photographs of normal lung and lung cancer tissues stained with humanized MN-E6-scFv-Fc biotinylated anti-MUC1* antibody at 2.5 ug/mL, then stained with a secondary streptavidin HRP antibody. A) is a normal lung tissue. B,C are lung cancer tissues from patients as denoted in the figure. D-F are photographs of the corresponding serial sections that were stained with the secondary antibody alone.

[0159] FIGS. 49A-49F show photographs of normal lung and lung cancer tissues stained with humanized MN-E6-scFv-Fc biotinylated anti-MUC1* antibody at 2.5 ug/mL, then stained with a secondary streptavidin HRP antibody. A) is a normal lung tissue. B,C are lung cancer tissues from patients as denoted in the figure. D-F are photographs of the corresponding serial sections that were stained with the secondary antibody alone.

[0160] FIGS. 50A-50F show photographs of normal lung and lung cancer tissues stained with humanized MN-E6-scFv-Fc biotinylated anti-MUC1* antibody at 25 ug/mL, then stained with a secondary streptavidin HRP antibody. A) is a normal lung tissue. B,C are lung cancer tissues from patients as denoted in the figure. D-F are photographs of the corresponding serial sections that were stained with the secondary antibody alone.

[0161] FIGS. 51A-51F show photographs of normal lung and lung cancer tissues stained with humanized MN-E6-scFv-Fc biotinylated anti-MUC1* antibody at 25 ug/mL, then stained with a secondary streptavidin HRP antibody. A) is a normal lung tissue. B,C are lung cancer tissues from patients as denoted in the figure. D-F are photographs of the corresponding serial sections that were stained with the secondary antibody alone.

[0162] FIGS. 52A-52D show photographs of normal small intestine and cancerous small intestine tissues stained with humanized MN-E6-scFv-Fc biotinylated anti-MUC1* antibody at 5 ug/mL, then stained with a secondary streptavidin HRP antibody. A) is a normal small intestine tissue. B) is small intestine cancer from patient as denoted in the figure. C,D are photographs of the corresponding serial sections that were stained with the secondary antibody alone.

[0163] FIGS. 53A-53H show photographs of normal small intestine tissues stained with humanized MN-E6-scFv-Fc anti-MUC1* antibody at 50 ug/mL, then stained with a secondary goat-anti-human HRP antibody. A-D are normal small intestine tissue. E-H are photographs of the corresponding serial sections that were stained with the secondary antibody alone.

[0164] FIGS. 54A-54H show photographs of cancerous small intestine tissues stained with humanized MN-E6-scFv-Fc anti-MUC1* antibody at 50 ug/mL, then stained with a secondary goat-anti-human HRP antibody. A-D are cancerous small intestine tissue from a patient as denoted in figure. E-H are photographs of the corresponding serial sections that were stained with the secondary antibody alone.

[0165] FIGS. 55A-55H show photographs of cancerous small intestine tissues stained with humanized MN-E6-scFv-Fc anti-MUC1* antibody at 50 ug/mL, then stained with a secondary goat-anti-human HRP antibody. A-D are cancerous small intestine tissue from a patient as denoted in figure. E-H are photographs of the corresponding serial sections that were stained with the secondary antibody alone.

[0166] FIGS. 56A-56H show photographs of normal colon tissues stained with humanized MN-E6-scFv-Fc anti-MUC1* antibody at 50 ug/mL, then stained with a secondary goat-anti-human HRP antibody. A-D are normal colon. E-H are photographs of the corresponding serial sections that were stained with the secondary antibody alone.

[0167] FIGS. 57A-57H show photographs of colon cancer tissues stained with humanized MN-E6-scFv-Fc anti-MUC1* antibody at 50 ug/mL, then stained with a secondary goat-anti-human HRP antibody. A-D are colon cancer tissue from a metastatic patient as denoted in figure. E-H are photographs of the corresponding serial sections that were stained with the secondary antibody alone.

[0168] FIGS. 58A-58H show photographs of colon cancer tissues stained with humanized MN-E6-scFv-Fc anti-MUC1* antibody at 50 ug/mL, then stained with a secondary goat-anti-human HRP antibody. A-D are colon cancer tissue from a Grade 2 patient as denoted in figure. E-H are photographs of the corresponding serial sections that were stained with the secondary antibody alone.

[0169] FIGS. 59A-59H show photographs of colon cancer tissues stained with humanized MN-E6-scFv-Fc anti-MUC1* antibody at 50 ug/mL, then stained with a secondary goat-anti-human HRP antibody. A-D are colon cancer tissue from a metastatic patient as denoted in figure. E-H are photographs of the corresponding serial sections that were stained with the secondary antibody alone.

[0170] FIGS. 60A-60H show photographs of prostate cancer tissues stained with humanized MN-E6-scFv-Fc anti-MUC1* antibody at 50 ug/mL, then stained with a secondary goat-anti-human HRP antibody. A-D are prostate cancer tissue from a patient as denoted in figure. E-H are photographs of the corresponding serial sections that were stained with the secondary antibody alone.

[0171] FIGS. 61A-61H show photographs of prostate cancer tissues stained with humanized MN-E6-scFv-Fc anti-MUC1* antibody at 50 ug/mL, then stained with a secondary goat-anti-human HRP antibody. A-D are prostate cancer tissue from a patient as denoted in figure. E-H are photographs of the corresponding serial sections that were stained with the secondary antibody alone.

[0172] FIGS. 62A-62H show photographs of prostate cancer tissues stained with humanized MN-E6-scFv-Fc anti-MUC1* antibody at 50 ug/mL, then stained with a secondary goat-anti-human HRP antibody. A-D are prostate cancer tissue from a patient as denoted in figure. E-H are photographs of the corresponding serial sections that were stained with the secondary antibody alone.

[0173] FIG. 63 shows fluorescence activated cell sorting (FACS) measurements of human CD34+ bone marrow cells stained with anti-MUC1* monoclonal antibodies MNC3 or MNE6 or an isotype control antibody. The histogram of the FACS assay and the bar graph showing the data show that the MUC1* positive cells of the bone marrow are recognized by one anti-MUC1* antibody, MNC3 but not by another MNE6.

[0174] FIG. 64 shows photographs of DU145 prostate cancer cells or T47D breast cancer cells that have been treated with either the Fab of anti-MUC1* antibody MNC2, MNE6, MNC3 or MNC8. The images show that cancer specific antibodies MNC2 and MNE6 effectively kill prostate and breast cancer cells while the monoclonal antibodies MNC3 and MNC8 do not.

[0175] FIG. 65 shows a graph of a PCR experiment comparing expression of a wide range of cleavage enzymes expressed in different cells lines, wherein the values have been normalized to those expressed in breast cancer cell line T47D. Cell lines that are compared are prostate cancer cell line DU145, HCT-MUC1-41TR that is a MUC1 negative colon cancer cell line transfected with a MUC1 whose extracellular domain is truncated after 41 tandem repeat units and that is not cleaved to the MUC1* form, T47D breast cancer cell line and CD34+ bone marrow cells.

[0176] FIG. 66 shows the graph of the PCR experiment of FIG. 65 but with the Y-axis maximum set to 5.

[0177] FIGS. 67A-67B show a graph of a FACS experiment wherein the effect of a panel of cleavage enzyme inhibitors is assessed for breast cancer cell line T47D. FIG. 67A shows the percentage of cells that test positive for full-length MUC1 antibody VU4H5 or for anti-MUC1* monoclonal antibody MNC2. FIG. 67B shows the mean fluorescence intensity of cells probed with antibody VU4H5 versus MNC2. As can be seen, TAPI-1 inhibitor and MMP2/9 V inhibitor inhibited cleavage of MUC1.

[0178] FIGS. 68A-68B show graphs of a FACS experiment wherein the effect of a panel of cleavage enzyme inhibitors is assessed for prostate cancer cell line DU145. FIG. 68A shows the percentage of cells that test positive for full-length MUC1 antibody VU4H5 or for anti-MUC1* monoclonal antibody MNC2. FIG. 68B shows the mean fluorescence intensity of cells probed with antibody VU4H5 versus MNC2. As can be seen, none of the cleavage enzyme inhibitors had an effect on MUC1 cleavage.

[0179] FIGS. 69A-69B show photographs of serial sections of a breast cancer array that was probed with either full-length antibody VU4H5, FIG. 69A, or anti-MUC1* antibody MNC2, FIG. 69B. The Allred score for each tissue specimen is shown in the graphs below each array photograph, FIG. 69C-69D. The percentage of each array that did not stain at all with the antibody or stained weakly, medium, or strong is graphed as a pie chart and shown in FIG. S7E-S7F.

[0180] FIGS. 70A-70F show photographs of a triple negative breast cancer array stained with anti-MUC1* antibody huMNC2scFv. The first score shown is the Allred score and the second is the tumor grade. The percentage of the array that scored zero, weak, medium or strong is graphed as a pie chart. FIG. 70A shows the pie chart of score of anti-MUC1* antibody staining. FIG. 70B shows a photograph of the array stained with the antibody. FIGS. 70C-70D show magnified photographs of two of the breast cancer specimens from the array. FIGS. 70C-70D show more magnified photographs of the portion of the specimen that is marked by a box.

[0181] FIGS. 71A-71F show photographs of an ovarian cancer array stained with anti-MUC1* antibody huMNC2scFv. The first score shown is the Allred score and the second is the tumor grade. The percentage of the array that scored zero, weak, medium or strong is graphed as a pie chart. FIG. 71A shows the pie chart of score of anti-MUC1* antibody staining. FIG. 71B shows a photograph of the array stained with the antibody. FIGS. 71C-71D show magnified photographs of two of the breast cancer specimens from the array. FIGS. 71C-71D show more magnified photographs of the portion of the specimen that is marked by a box.

[0182] FIGS. 72A-72F show photographs of a pancreatic cancer array stained with anti-MUC1* antibody huMNC2scFv. The first score shown is the Allred score and the second is the tumor grade. The percentage of the array that scored zero, weak, medium or strong is graphed as a pie chart. FIG. 72A shows the pie chart of score of anti-MUC1* antibody staining. FIG. 72B shows a photograph of the array stained with the antibody. FIGS. 72C-72D show magnified photographs of two of the breast cancer specimens from the array. FIGS. 72C-72D show more magnified photographs of the portion of the specimen that is marked by a box.

[0183] FIGS. 73A-73F show photographs of a lung cancer array stained with anti-MUC1* antibody huMNC2scFv. The first score shown is the Allred score and the second is the tumor grade. The percentage of the array that scored zero, weak, medium or strong is graphed as a pie chart. FIG. 73A shows the pie chart of score of anti-MUC1* antibody staining. FIG. 73B shows a photograph of the array stained with the antibody. FIGS. 73C-73D show magnified photographs of two of the breast cancer specimens from the array. FIGS. 73C-73D show more magnified photographs of the portion of the specimen that is marked by a box.

[0184] FIGS. 74A-74I show photographs of normal tissues stained with anti-MUC1* antibody huMNC2scFv.

[0185] FIGS. 75A-75P show photographs of a CAR T co-culture assay in which the targeting antibody fragment of the CAR is huMNC2scFv wherein CAR44 has a CD8 transmembrane domain, followed by 41BB-3zeta and CAR50 has a CD4 transmembrane domain, followed by 41BB-3zeta. The target cancer cells are: HCT-FLR which is HCT-116 cells transfected with MUC1*₄₅ and HCT-MUC1-41TR, which is a stable single cell clone HCT-116 cell line that expresses MUC1 with an extracellular domain truncated after 41 tandem repeats and that does not get cleaved to the MUC1* form on its own. The HCT-MUC1-41TR cancer cells were also incubated with conditioned media from cells transfected with MMP9 or ADAM17 before co-culture with the CAR T cells. Conditioned media of the MMP9 or ADAM17 expressing cells were also incubated with APMA which is an activator of those cleavage enzymes. The images shown are an overlay of the 4× bright field image and the fluorescent image of the same showing cancer cells dyed with a red CMTMR lipophilic dye. FIGS. 75A, 75E, 75I, 75M show photographs of cells co-cultured with untransduced human T cells.

[0186] FIGS. 75B, 75F, 75J, 75N show photographs of cells co-cultured with human T cells transduced with anti-MUC1* CAR44 at an MOI of 10. FIGS. 75C, 75G, 75K, 75O show photographs of cells co-cultured with human T cells transduced with anti-MUC1* CAR50 at an MOI of 10. FIGS. 75D, 75H, 75L, 75P show photographs of cells co-cultured with human T cells transduced with anti-MUC1* CAR44 at an MOI of 50, which increases transduction efficiency. FIGS. 75B, 75C, 75D show that both CAR44 and CAR50 transduced T cells recognized MUC1* expressed in these cancer cells, bound to them, induced clustering and killed many cancer cells. FIGS. 75F, 75G, 75H show that neither CAR44 nor CAR50 transduced T cells recognize full-length MUC1 expressed in HCT-MUC1-41TR cancer cells. There is no T cell induced clustering and the number of cancer cells has not decreased. FIGS. 75J, 75K, 75L show that activated MMP9 has cleaved full-length MUC1 to a MUC1* form that is recognized by both CAR44 and CAR50 transduced T cells. There is clearly visible CAR T cell induced clustering and a decrease in the number of cancer cells as they are killed.

[0187] FIGS. 75N, 75O, 75P show that activated ADAM17 has either not cleaved MUC1 or cleaved it at a position not recognized by MNC2. Neither huMNC2-CAR44 nor huMNC2-CAR50 transduced T cells recognized these cancer cells.

[0188] FIG. 76 shows photographs of a CAR T co-culture assay in which the targeting antibody fragment of the CAR is MNC2 scFv wherein CAR44 has a CD8 transmembrane domain, followed by 41BB-3zeta and CAR50 has a CD4 transmembrane domain, followed by 41BB-3zeta. The target cancer cells are breast cancer T47D cells that were also incubated with conditioned media from cells transfected with MMP2, MMP9 or ADAM17 before co-culture with the MNC2-CAR T cells. In some cases, the conditioned media of the MMP2 and MMP9 expressing cells were also incubated with APMA, which is an activator of these cleavage enzymes. The images shown are an overlay of the 4× bright field image and the fluorescent image of the same showing cancer cells dyed with a red CMTMR lipophilic dye. As can be seen, the MNC2-CAR T cells only bind to and attack the target cancer cells that express the cleaved form, MUC1*.

[0189] FIGS. 77A-77I show photographs of cancer cells co-cultured with anti-MUC1* CAR T cells, wherein some of the cancer cells were pre-incubated with activated MMP9 prior to co-culture with the CAR T cells. The cancer cells shown in FIGS. 77A-77C are MUC1 negative colon cancer cell line HCT-116 that have been stably transfected to express MUC1*. The cancer cells shown in FIGS. 77D-77F are MUC1 positive breast cancer cell line T47Ds that express high levels of both MUC1 full-length and MUC1*. The cancer cells shown in FIGS. 77G-77I are MUC1 positive breast cancer cell line T47Ds that were pre-incubated with activated MMP9. The cells shown in FIGS. 77A, 77D and 77G were co-cultured with untransduced human T cells and are the controls. The cells shown in FIGS. 77B, 77E and 77H were co-cultured with human T cells that were transduced with huMNC2-CAR44 at an MOI of 10, wherein MOI stands for multiplicity of infection and the higher the MOI the more CARs are expressed on the T cells. The cells shown in FIGS. 77C, 77F and 77I were co-cultured with human T cells that were transduced with huMNC2-CAR44 at an MOI of 50. As can be seen in the photographs, the CAR44 T cells bind to the target MUC1* positive cancer cells, surrounding and killing them. Comparing the photograph of FIG. S15F with that of FIG. 77I, it can be seen that the cells that were pre-incubated with MMP9 become much more susceptible to CAR T killing when the antibody targeting head of the CAR recognizes MUC1*. It also demonstrates that MUC1 cleaved by MMP9 is recognized by huMNC2scFv.

[0190] FIG. 78 shows an xCelligence graph of T47D breast cancer cells in co-culture with either untransduced T cells, as a control, or huMNC2-CAR44 T cells over a 45 hour period. After 18 hours of cancer cell growth, a catalytic sub-unit MMP9 was added to some of the cells. At 25 hours, T cells were added. As can be seen, huMNC2-CAR44 T cell killing is greatly improved when the T47D cells are pre-incubated with cleavage enzyme MMP9. In the xCelligence system, target cancer cells, which are adherent, are plated onto electrode array plates. Adherent cells insulate the electrode and increase the impedance. The number of adherent cancer cells is directly proportional to impedance. T cells are not adherent and do not contribute to impedance. Therefore, increasing impedance reflects growth of cancer cells and decreasing impedance reflects killing of cancer cells.

[0191] FIG. 79 shows an xCelligence graph of DU145 prostate cancer cells in co-culture with either untransduced T cells, as a control, or huMNC2-CAR44 T cells over a 45 hour period. After 18 hours of cancer cell growth, a catalytic sub-unit MMP9 was added to some of the cells. At 25 hours, T cells were added. As can be seen, huMNC2-CAR44 T cell killing is not affected by pre-incubation with cleavage enzyme MMP9. DU145 cancer cells express a significantly lower amount of MUC1 which includes the full-length form as well as MUC1*. The lower density of MUC1 full-length does not sterically hinder T cell access to the membrane proximal MUC1*.

[0192] FIGS. 80A-80F show photographs of T47D mCherry transfected breast cancer cells co-cultured with either normal human T cells or human T cells transduced with a MUC1* targeting CAR that is GFP positive, green, and wherein the antibody fragment that is the targeting head of the CAR is huMNC2-scFv. FIG. 80A shows breast cancer cells, red, co-cultured with normal human T cells. No T cell induced clustering is evident. FIG. 80B shows breast cancer cells, red, co-cultured with human T cells transduced with huMNC2-CAR18. T cell induced clustering can be seen. FIG. 80C shows the cancer cells co-cultured with huMNC2-CAR19 and T cell induced clustering is seen.

[0193] FIG. 80D shows the cancer cells co-cultured with a mixture of huMNC2-CAR44 and CAR49 and T cell induced clustering is seen. FIG. 80E shows the cancer cells co-cultured with a huMNC2-CAR44 and T cell induced clustering is seen. FIG. X1F shows the cancer cells co-cultured with huMNC2-CAR50 and T cell induced clustering is seen.

[0194] FIGS. 81A-81D show photographs of human huMNC2-CAR44 T cells injecting granzyme B (yellow) into MUC1* positive and GFP positive (green) DU145 prostate cancer cells. FIG. 81A is a 4× magnified photograph. FIG. 81B is a 20× magnified photograph. FIG. 81C is a 20× magnified photograph. FIG. 81D is a 40× magnified photograph.

[0195] FIGS. 82A-82B show the killing effect of huMNC2-CAR44 T cells on T47D MUC1* positive breast cancer cells, wherein the breast cancer cells have been transfected with increasing amounts of additional MUC1*. As can be seen, the killing effect of the huMNC2-CAR44 T cells increases as the amount of target MUC1* expressed on the cells increases. FIG. 82A is a graph of target cell killing as measured by FACS. FIG. 82B is a graph of an ELISA assay in which the supernatant from the huMNC2-CAR44 T cells in co-culture with the T47D cells is probed for the presence of secreted interferon gamma, which is a sign of T cell activation.

[0196] FIGS. 83A-83D show the results of FACS analysis of huMNC2-CAR44 T cells after 24 hours of co-culture with MUC1* positive cancer cells. FIG. 83A is a graph of FACS data showing the percentage of T47D cancer cells that were killed by huMNC2-CAR44 T cells (blue bars), compared to untransduced T cells (red bars). The X-axis shows the ratio of T cells to cancer cells. FIG. 83B is a graph of FACS data showing the percentage of K562-MUC1* cancer cells that were killed by huMNC2-CAR44 T cells (blue bars), compared to untransduced T cells (red bars). FIG. 83C shows the FACS scans wherein the T47D breast cancer cells were stained with the dye CMTMR. Sytox blue is a dead cell stain. Dead cancer cells are those in quadrants 2 and 3. FIG. 83D shows the FACS scans wherein the K562-MUC1* cancer cells were stained with the dye CMTMR. Sytox blue is a dead cell stain. Dead cancer cells are those in quadrants 2 and 3.

[0197] FIGS. 84A-84H show the cytotoxic effect of huMNC2-CAR44 T cells on MUC1* positive DU145 prostate cancer cells as measured by a variety of assays. FIG. 84A is a fluorescent photograph of untransduced T cells co-cultured with the prostate cancer cells, wherein granzyme B is stained with a red fluorophore. FIG. 84B shows merging of DAPI and granzyme B. FIG. 84C is a fluorescent photograph of huMNC2-CAR44 T cells co-cultured with the prostate cancer cells, wherein granzyme B is stained with a red fluorophore. FIG. 84D shows merging of DAPI and granzyme B. FIG. 84E is a FACS scan for fluorescently labeled granzyme B for untransduced T cells incubated with the cancer cells. FIG. 84F is a FACS scan showing a positive increase in fluorescently labeled granzyme B for huMNC2-CAR44 T cells incubated with the cancer cells. FIG. 84G is a graph of the mean fluorescent intensity. FIG. 84H is an xCELLigence scan tracking the real-time killing of DU145 cancer cells by huMNC2-CAR44 T cells (blue trace) but not by untransduced T cells (green).

[0198] FIGS. 85A-85H show the cytotoxic effect of huMNC2-CAR44 T cells on MUC1* positive CAPAN-2 pancreatic cancer cells as measured by a variety of assays. FIG. 85A is a fluorescent photograph of untransduced T cells co-cultured with the pancreatic cancer cells, wherein granzyme B is stained with a red fluorophore. FIG. 85B shows merging of DAPI and granzyme B. FIG. 85C is a fluorescent photograph of huMNC2-CAR44 T cells co-cultured with the pancreatic cancer cells, wherein granzyme B is stained with a red fluorophore. FIG. 85D shows merging of DAPI and granzyme B. FIG. 85E is a FACS scan for fluorescently labeled granzyme B for untransduced T cells incubated with the cancer cells. FIG. 85F is a FACS scan showing a positive increase in fluorescently labeled granzyme B for huMNC2-CAR44 T cells incubated with the cancer cells. FIG. 85G is a graph of the mean fluorescent intensity. FIG. 85H is an xCELLigence scan tracking the real-time killing of CAPAN-2 cancer cells by huMNC2-CAR44 T cells (blue trace) but not by untransduced T cells (green).

[0199] FIGS. 86A-86C show xCELLigence scans tracking the real-time killing of MUC1* positive cancer cells, but not MUC1* negative cells, by huMNC2-CAR44 T cells. FIG. 86A shows that huMNC2-CAR44 T cells effectively kill HCT colon cancer cells that have been stably transfected with MUC1*. FIG. 86B shows that huMNC2-CAR44 T cells have almost no effect on HCT-MUC1-41TR, which is a MUC1 negative cancer cell that has been stably transfected with a MUC1 full-length. In this cell line only about 10% of the cells have MUC1 cleaved to MUC1*. FIG. 86C shows that huMNC2-CAR44 T cells have no effect on HCT-116 cells, which is a MUC1 negative colon cancer cell line.

[0200] FIGS. 87A-87L show 4× magnification photographs of either untransduced T cells or huMNC2-scFv-CAR44 T cells subjected to either no stimulation, a 1-time bead bearing MUC1* peptide stimulation or a 2-times MUC1* positive cancer cell stimulation. FIGS. 87A-87F show the effect on untransduced T cells. FIGS. 87G-87L show the effect on huMNC2-scFv-CAR44 T cells. FIGS. 87A and 87G received no stimulation. FIGS. 87B and 87H were stimulated twice, 24 hours each stimulation with HCT-MUC1* cancer cells 24 hours prior to photography. FIGS. 87C-87F and FIGS. 871-87L were stimulated once for 24 hours with 1 μm or 4.5 μm beads coated with the PSMGFR MUC1* extra cellular domain peptide 24 hours prior to photography.

[0201] FIGS. 88A-88D show FACS analysis of the sub-populations of human T cells transduced with huMNC2-scFv-CAR44 as a result of 1-time stimulation by co-culture with beads bearing MUC1* synthetic peptide or 3-time stimulation by co-culture with HCT-MUC1* cancer cells. FIG. 88A shows FACS scan of huMNC2-scFv-CAR44 transduced human T cells without stimulation. FIG. 88B shows FACS scan of huMNC2-scFv-CAR44 transduced human T cells with 1-time stimulation by co-culture with MUC1* peptide presenting beads. FIG. 88C shows FACS scan of huMNC2-scFv-CAR44 transduced human T cells stimulated 3-times by co-culture with HCT-MUC1* cancer cells. FIG. 88D shows graphical representation of the FACS data. FIGS. 88E-88J show graphs of FACS analysis of T cell activation markers after huMNC2-scFv-CAR44 transduced human T cells were subjected to 1-time MUC1* peptide presenting bead stimulation. FIGS. 88E-88F show FACS of activation marker CD25. FIGS. 88G-88H show FACS of activation marker CD69. FIGS. 88I-88J show FACS of activation marker Granzyme B. FIGS. 88E, 88G, 88I show FACS of huMNC2-scFv-CAR44 transduced human T cells without bead stimulation. FIGS. 88F, 88H, 88J show FACS of huMNC2-scFv-CAR44 transduced human T cells after bead stimulation.

[0202] FIGS. 89A-89C show graphs of real time CAR T induced cancer cell killing as measured on an xCELLigence instrument. The figures show the enhanced killing effect of huMNC2-scFv-CAR44 T cells after pre-stimulation by co-culture with MUC1* presenting beads. FIG. 89A shows the enhanced killing effect of peptide bead stimulated huMNC2-CAR44 T cells on SKOV-3 ovarian cancer cells wherein the ratio of T cells to cancer cells was 1:1. FIG. 89B shows the enhanced killing effect of peptide bead stimulated huMNC2-CAR44 T cells on BT-20 triple negative breast cancer cells wherein the ratio of T cells to cancer cells was 1:1. FIG. 89C shows the enhanced killing effect of peptide bead stimulated huMNC2-CAR44 T cells on HCT-MUC1* colon cancer cells wherein the ratio of T cells to cancer cells was 1:1.

[0203] FIGS. 90A-90D show graphs of real time cell growth versus cell death as measured on an xCELLigence instrument. Shown is the effect of MUC1* cancer cell stimulation of huMNC2-scFv-CAR44 transduced human T cells on a variety of cancer cells, some of which were previously resistant to CAR T cell killing. FIG. 90A shows an xCELLigence graph of the effect of huMNC2-scFv-CAR44 transduced human T cells that were pre-stimulated by co-culture with HCT-MUC1* cancer cells 24 hours prior to co-culture with the target T47D breast cancer cells. FIG. 90B shows an xCELLigence graph of the effect of huMNC2-scFv-CAR44 transduced human T cells that were pre-stimulated by co-culture with HCT-MUC1* cancer cells 24 hours prior to co-culture with the target BT-20 triple negative breast cancer cells. FIG. 90C shows an xCELLigence graph of the effect of huMNC2-scFv-CAR44 transduced human T cells that were pre-stimulated by co-culture with HCT-MUC1* cancer cells 24 hours prior to co-culture with the target SKOV-3 ovarian cancer cells. FIG. 90D shows an xCELLigence graph of the effect of huMNC2-scFv-CAR44 transduced human T cells that were pre-stimulated by co-culture with HCT-MUC1* cancer cells 24 hours prior to co-culture with the target HCT-MUC1* cancer cells that were effectively killed with or without pre-stimulation.

[0204] FIGS. 91A-91Y show fluorescent photographs of mice taken on an IVIS instrument. NSG (NOD/SCID/GAMMA) immune compromised mice that on Day 0 were sub-cutaneously implanted on the flank with 500,000 human MUC1* positive cancer cells that had been stably transfected with Luciferase. Tumors were allowed to engraft. On Day 5 after IVIS measurement and on Day 12, animals were injected with 10 million of either human T cells transduced with huMNC2-scFv-CAR44, untransduced T cells or PBS. 5 million T cells were injected intra-tumor and 5 million T cells were injected into the tail vein. 10 minutes prior to IVIS photographs, mice were injected intraperitoneally (IP) with Luciferin, which fluoresces after cleavage by Luciferase, thus making tumor cells fluoresce. FIGS. 91A, 91E, 91I, 91M, 91Q, 91U show photographs of mice that were treated with huMNC2-scFv-CAR44 T cells that had been pre-stimulated by co-culturing for 24 hours with 4 μm beads to which was attached a synthetic MUC1*, PSMGFR peptide 24 hours prior to administration: Protocol 1. FIGS. 91B, 91F, 91J, 91N, 91R, 91V show photographs of mice that were treated with huMNC2-scFv-CAR44 T cells that had been pre-stimulated by twice co-culturing for 24 hours with MUC1* positive cancer cells 24 hours prior to administration: Protocol 2. FIGS. 91C, 91G, 91K, 91O, 91S, 91W show photographs of mice that were treated with untransduced human T cells. FIGS. 91D, 91H, 91L, 91P, 91T, 91X show photographs of mice that were treated with PBS. FIGS. 91A-91D show IVIS photographs taken on Day 5 before T cell injection. FIGS. 91E-91H show IVIS photographs taken on Day 7. FIGS. 91I-91L show IVIS photographs taken on Day 11. FIGS. 91M-91P show IVIS photographs taken on Day 13. FIGS. 91Q-91T show IVIS photographs taken on Day 18. FIGS. 91U-91V show IVIS photographs taken on Day 21. Animals in untransduced T cell and PBS group had to be sacrificed on Day 20 due to excessive tumor volume. FIGS. 91W-91X show photographs of excised tumors. FIG. 91Y is a color scale relating fluorescence in photons/second to color.

[0205] FIGS. 92A-92J show fluorescent photographs of mice taken on an IVIS instrument. NSG (NOD/SCID/GAMMA) immune compromised mice that on Day 0 were sub-cutaneously injected into the flank with 500K human BT-20 cells which are a MUC1* positive triple negative breast cancer cell line. The cancer cells had been stably transfected with Luciferase. Tumors were allowed to engraft. On Day 6 after IVIS measurement, animals were given a one-time injection of 10 million of either human T cells transduced with huMNC2-scFv-CAR44 or untransduced T cells. 5 million T cells were injected intra-tumor and 5 million were injected into the tail vein. 10 minutes prior to IVIS photographs, mice were IP injected with Luciferin, which fluoresces after cleavage by Luciferase, thus making tumor cells fluoresce. FIGS. 92A, 92D, 92G show photographs of mice that were treated with huMNC2-scFv-CAR44 T cells that had been pre-stimulated by co-culturing for 24 hours with 4 μm beads to which was attached a synthetic MUC1*, PSMGFR peptide 24 hours prior to administration: Protocol 1. FIGS. 92B, 92E, 92H show photographs of mice that were treated with huMNC2-scFv-CAR44 T cells that had been pre-stimulated by twice co-culturing for 24 hours with MUC1* positive cancer cells 24 hours prior to administration: Protocol 2. FIGS. 92C, 92F, 92I show photographs of mice that were treated with untransduced human T cells. FIG. 92J is a color scale relating fluorescence in photons/second to color.

[0206] FIGS. 93A-93M show fluorescent photographs of mice taken on an IVIS instrument. NSG (NOD/SCID/GAMMA) immune compromised mice that on Day 0 were injected into the intraperitoneal cavity (IP) with 500K human SKOV-3 cells which are a MUC1* positive ovarian cancer cell line. The cancer cells had been stably transfected with Luciferase. Tumors were allowed to engraft. On Day 4, animals were injected into the intraperitoneal space with 10M either human T cells transduced with huMNC2-scFv-CAR44, untransduced T cells or PBS. On Day 11, animals were injected again except that half the cells were injected into the tail vein and the other half was IP injected. Animals were imaged by IVIS on Days 3, 7, 10 and 15. 10 minutes prior to IVIS photographs, mice were IP injected with Luciferin, which fluoresces after cleavage by Luciferase, thus making tumor cells fluoresce. FIGS. 93A, 93D, 93G, and 93J show photographs of mice that were treated with huMNC2-scFv-CAR44 T cells that had been pre-stimulated by co-culturing for 24 hours with 1 μm beads to which was attached a synthetic MUC1*, PSMGFR peptide 24 hours prior to administration. FIGS. 93B, 93E, 93H, and 93K show photographs of mice that were treated with untransduced human T cells. FIGS. 93C, 93F, 93I, and 93L show photographs of mice that were treated with PBS. FIGS. 93A, 93B and 93C are IVIS images taken Day 3 prior to CAR T, T cell or PBS administration. FIGS. 93D, 93E and 93F show IVIS images of animals on Day 7, just four (4) days after treatment. FIGS. 93G, 93H, and 93I show IVIS images of animals on Day 10. FIGS. 93J, 93K, and 93L show IVIS images of animals on Day 15 FIG. 93M is the IVIS color scale relating fluorescence in photons/second to color.

[0207] FIGS. 94A-94B are cartoons depicting a steric hindrance problem of MUC1 full-length obstructing access of T cells to the growth factor receptor MUC1*. FIG. 94A is a cartoon showing that late stage cancer cells primarily express cleaved MUC1, such that T cells have easy access to the growth factor receptor. FIG. 94B is a cartoon showing that earlier stage cancer cells express both the MUC1* growth factor receptor and full-length MUC1. Full-length MUC1 is 10-times longer than MUC1* so sterically hinders T cell binding to MUC1*. MMP9 is depicted here as a molecular scissors that, after T cell activation, cuts through full-length protein to make MUC1* more accessible.

[0208] FIGS. 95A-95D show Western blots and corresponding FACs analysis of HCT-116 cells which are a MUC1 negative colon cancer cell line, that were then stably transfected with either MUC1* or MUC1 full-length. The single cell clones that are shown are HCT-MUC1-41TR, and HCT-MUC1*. FIG. 95A shows a Western blot of the parent cell line HCT-116, HCT-MUC1-41TR and HCT-MUC1* wherein the gel has been probed with a rabbit polyclonal antibody, SDIX, that only recognizes cleaved MUC1. A visible band between 25 and 35 kDa can be readily seen in Lane 6, loaded with HCT-MUC1*, whereas there is only a faint band in Lanes 4 and 5, showing that only a small amount of MUC1 is cleaved in the HCT-MUC1-41Tr cells. There is no cleaved MUC1 present in the parent cell line HCT-116 loaded into Lanes 2 and 3. FIG. 95B is a Western blot that was probed with a mouse monoclonal antibody VU4H5 that recognizes the tandem repeats of full-length MUC1. As can be seen, only HCT-MUC1-41TR contains full-length MUC1. FIG. 95C shows FACS scans showing that HCT-MUC1* is 95.7% positive for SDIX which only binds to MUC1* and essentially not at all for MUC1 full-length. FIG. 95D shows FACS scans that show that HCT-MUC1-41TR cells are 95% positive for full-length MUC1 and only about 11% positive for the cleaved form, MUC1*.

[0209] FIGS. 96A-96E show photographs of an immunofluorescence experiment. HCT-MUC1-41TR cancer cells express full-length MUC1. Notably, the cell line does not naturally cleave MUC1 to MUC1*. Only about 10-15% of the MUC1 is cleaved to a MUC1* form. Here, we show that exposure of MUC1 full-length to MMP9 catalytic domain causes MUC1 cleavage to MUC1* which is recognized by anti-MUC1* antibody MNC2. The amount of binding of MNC2 to the cells is proportional to the amount of MMP9 added to the cells, which shows that MNC2 binds to MUC1 when it is cleaved by MMP9. FIG. 96A is the control and shows HCT-MUC1-41TR cells that have not been incubated with MMP9 but have been stained with MNC2. FIG. 96B shows HCT-MUC1-41TR cells that were incubated with 12.5 ng/mL MMP9 catalytic domain. FIG. 96C shows HCT-MUC1-41TR cells that were incubated with 25 ng/mL MMP9 catalytic domain. FIG. 96D shows HCT-MUC1-41TR cells that were incubated with 50 ng/mL MMP9 catalytic domain. FIG. 96E shows HCT-MUC1-41TR cells that were incubated with 100 ng/mL MMP9 catalytic domain.

[0210] FIG. 97 shows a graph of a fluorogenic peptide substrate of MMP9, the OMNIMMP peptide, being cleaved by MMP9 catalytic domain at two concentrations in either PBS, solid trace, or cell culture media, dashed trace.

[0211] FIGS. 98A-98F are photographs of Western blots of cell lysates probed with an antibody that recognizes the MMP9 construct that was transfected. A plasmid was constructed then transfected into HEK293T cells, wherein the gene for MMP9 catalytic domain was inserted downstream of either 3 or 4 NFAT response elements. The NFAT pathway was activated by the addition of PMA at 10 ng/mL and lonomycin at either 1 uM or 2 uM, except in control (ctl) cells in lanes 1, 2, 5, 6, 9, 10, 13, and 14. Lysate from cells transfected with the plasmid containing 3 repeats of a NFAT Response element were loaded into lanes 1, 3, 5, 7, 9, 11, 13, and 15. Lysate from cells transfected with the plasmid containing 4 repeats of a NFAT Response element were loaded into lanes 2, 4, 6, 8, 10, 12, 14, and 16. FIG. 98A and FIG. 98C show photographs exposed for 1 minute, whereas FIG. 98B and FIG. 98D show photographs exposed for 5 minutes. To the cell lysates of FIG. 98A and FIG. 98B no protease inhibitor was added. To the cell lysates of FIG. 98C and FIG. 98D a protease inhibitor was added. FIG. 98E shows photograph of Western blot in which MMP9 catalytic domain expressed off repeats of NFAT response element was pulled down from conditioned media of cells whose lysates are shown in FIG. 98A and FIG. 98B, lanes 7 and 8. Pulldown was done using beads to which were coupled an antibody that recognizes a Flag tag that was incorporated at the C-terminus of the MMP9 construct. Lane 1 shows a molecular weight control. Lanes 2, 3, 4 and 5 show MMP9 that was eluted from the anti-Flag tag beads. Lanes 2 and 3 were first elutions and the cells shown in Lanes 4 and 5 were second elutions. Into Lanes 2 and 4 were loaded conditioned media from cells in which the NFAT pathway had been activated with PMA 10 ng/mL and lonomycin at 1 uM. Into Lanes 3 and 5 were loaded conditioned media from cells in which the NFAT pathway had been activated with PMA 10 ng/mL and lonomycin at 2 uM. FIG. 98F is a schematic of the construct.

[0212] FIGS. 99A-99C show graphs of a fluorogenic peptide, OMNIMMP peptide, substrate of MMP9 being cleaved by the cell lysate or conditioned media of HEK293T cells that were transfected with a plasmid containing an MMP9 gene downstream from 4 repeats of an NFAT response element. The MMP9 peptide substrate assay shows that activation of the NFAT pathway by PMA/ionomycin caused an MMP9 to be expressed and secreted and that it was active as evidenced by its ability to cleave a peptide substrate. FIG. 99C is a schematic of the construct.

[0213] FIGS. 100A-100E show NFAT-induced MMP9 catalytic domain expressed in HEK293T cells wherein the native leader sequence of MMP9 has been replaced by an IgK leader sequence and MMP9 catalytic domain is downstream of 4 repeats of an NFAT response element. FIG. 100A shows photograph of Western blot detecting expression of MMP9 in the cell lysate after activation of the NFAT pathway. FIG. 100B shows photograph of Western blot detecting expression of MMP9 in the conditioned media after activation of the NFAT pathway. FIG. 100C shows graph of MMP9 fluorogenic peptide substrate, OMNIMMP peptide, cleavage by MMP9 catalytic domain expressed and secreted in conditioned media of HEK293T cells wherein the native leader sequence of MMP9 has been replaced by an IgK leader sequence and MMP9 catalytic domain is downstream of 4 repeats of an NFAT response element. FIG. 100D shows graph of MMP9 fluorogenic peptide substrate cleavage by MMP9 catalytic domain expressed and secreted in conditioned media of HEK293T cells wherein the native leader sequence of MMP9 has been replaced by an IgK leader sequence and MMP9 catalytic domain is downstream of 4 repeats of an NFAT response element. FIG. 100E is a schematic of the construct.

[0214] FIGS. 101A-101E show MMP9 can be expressed with different leader sequences and also show subsequent activity of each. FIG. 101A shows a Western blot detecting an MMP9 protein in cell lysate wherein the leader sequence upstream of the MMP9 gene is either its native sequence or an IgK sequence. FIG. 101B shows a Western blot detecting MMP9 in conditioned media wherein the leader sequence upstream of the MMP9 gene is its native sequence or an IgK sequence. FIG. 101C shows a graph of an MMP9 peptide substrate cleaved by the expressed MMP9. FIGS. 101D-101E are schematics of the constructs.

[0215] FIGS. 102A-102D show three (3) clones 4, 6 and 7 of cells transfected with a plasmid that produces an NFAT inducible MMP9 wherein the NFATc1 promoter sequence is upstream of the MMP9 gene, which in this case is a truncated MMP9 comprising its catalytic domain. Also shown for comparison is a cell transfected with a plasmid that produces an NFAT inducible MMP9 wherein 4 repeats of an NFAT response element sequence are upstream of an MMP9 gene. FIG. 102A shows a Western blot detecting an MMP9 protein in cell lysate. FIG. 102B shows a Western blot detecting MMP9 in the conditioned media. FIGS. 102C-102D are schematics of the constructs.

[0216] FIGS. 103A-103D show graphs of an MMP9 peptide substrate cleavage assay. FIG. 103A shows the cleavage activity of MMP9 from the lysate of cells transfected with a plasmid having MMP9 expression driven off of the NFATc1 promoter or off of 4 repeats of an NFAT response element. FIG. 103B shows the cleavage activity of MMP9 from the conditioned media of cells transfected with a plasmid having MMP9 expression driven off of the NFATc1 promoter or off of 4 repeats of an NFAT response element. FIGS. 103C-103D are schematics of the constructs.

[0217] FIGS. 104A-104B show the results of the OMNIMMP9 fluorogenic substrate assay that measures activity of MMP9. Conditioned media from human T cells transduced with NFAT-inducible MMP9 alone or in combination with CAR44 were added to the assay and MMP9 substrate cleavage was measured as a function of time. FIG. 104A shows MMP9 activity when human T cells were transduced with both CAR44 and an NFAT-inducible MMP9 after the cells were activated by co-culturing with HCT-MUC1* cancer cells. The trace that does not show increased substrate cleavage as a function of time is the conditioned media from cells that were not activated. FIG. 104B shows MMP9 activity when human T cells were transduced with just an NFAT-inducible MMP9 after the cells were activated by co-culturing with beads coated with anti-CD3 and anti-CD28 which are known to activate T cells. The trace that does not show increased substrate cleavage as a function of time is the conditioned media from cells that were not activated.

[0218] FIGS. 105A-105E show photographs of Western blots of human T cells transduced with either CAR44 alone, NFAT-inducible MMP9 alone or transduced with both CAR44 and NFAT-inducible MMP9, wherein the resultant T cells are either not activated, chemically activated by PMA/Ionomycin, activated by co-culturing with beads presenting synthetic MUC1* peptide or co-culturing with MUC1* positive cancer cells. Western blot was probed with an anti-Flag tag also known as DYK tag antibody. Catalytic domain of MMP9 runs with an apparent molecular weight of about 40 kDa. FIGS. 105A-105D show photographs of Western blots of cleared cell lysates. FIG. 105A has Lanes 1-7 loaded with lysates of: Lane 1: T cells transduced with CAR44 and not activated; Lane 2: T cells transduced with CAR44 and activated with beads presenting synthetic MUC1* extra cellular domain peptide; Lane 3: T cells transduced with CAR44 and activated by co-culture with HCT-MUC1* cancer cells; Lane 4: T cells transduced with CAR44 and NFAT-inducible MMP9 but not activated; Lane 5: T cells transduced with CAR44 and NFAT-inducible MMP9 and activated with beads presenting synthetic MUC1* extra cellular domain peptide; Lane 6: T cells transduced with CAR44 and NFAT-inducible MMP9 and activated by co-culture with HCT-MUC1* cancer cells; Lane 7: an irrelevant protein also bearing the Flag DYK tag. Results show that T cells transduced with NFAT-inducible MMP9 only express MMP9 when they are activated by PMA/Ionomycin, MUC1* beads or MUC1* positive cancer cells. T cells transduced with both CAR44 and NFAT-inducible MMP9 only express MMP9 when the T cells are activated by stimulation with MUC1* beads or with MUC1* positive cancer cells. FIG. 105B has Lanes 1-7 loaded with lysates of: Lane 1: T cells transduced with CAR44 and not activated; Lane 2: T cells transduced with CAR44 and activated with beads presenting anti-CD3 and anti-CD28 antibodies that are known to activate T cells; Lane 3: T cells transduced with CAR44 and activated by co-culture with PMA/Ionomycin; Lane 4: T cells transduced with NFAT-inducible MMP9 but not activated; Lane 5: T cells transduced with NFAT-inducible MMP9 and activated with beads presenting anti-CD3 and anti-CD28 antibodies; Lane 6: T cells transduced with NFAT-inducible MMP9 and activated by PMA/Ionomycin; Lane 7: an irrelevant protein also bearing the Flag DYK tag. FIGS. 105C and 105D are darker exposures of the same Western blots shown in FIGS. 105A and 105B, respectively. FIG. 105E is a photograph of a Western blot of cell supernatants of cells transduced as follows: Lane 1: T cells transduced with CAR44 and not activated; Lane 2: T cells transduced with CAR44 and activated with beads presenting anti-CD3 and anti-CD28 antibodies that are known to activate T cells; Lane 3: T cells transduced with CAR44 and activated by co-culture with PMA/Ionomycin; Lane 4: T cells transduced with NFAT-inducible MMP9 but not activated; Lane 5: T cells transduced with NFAT-inducible MMP9 and activated with beads presenting anti-CD3 and anti-CD28 antibodies; Lane 6: T cells transduced with NFAT-inducible MMP9 and activated by PMA/Ionomycin; Lane 7: an irrelevant protein also bearing the Flag DYK tag. Results show that T cells transduced with NFAT-inducible MMP9 express MMP9 when they are activated. T cells transduced with both CAR44 and NFAT-inducible MMP9 are specifically activated when they are co-cultured with beads or cells presenting or expressing MUC1* (FIG. 105A Lane 5 and Lane 6).

[0219] FIGS. 106A-106B show a cartoon of a series of “long-arm” CARs that were generated to overcome the steric hindrance caused by full-length MUC1. FIG. 106A shows a cartoon of the CARs with longer linker region between the cell membrane and the antibody scfv. FIG. 106B shows a cartoon of how they overcome steric hindrance of MUC1 full-length.

[0220] FIGS. 107A-107B show xCelligence graphs of MUC1 positive breast cancer T47D cells in co-culture with either untransduced T cells, as a control, or several different long-arm CAR T cells, wherein the length and sequence of the linker between the antibody scFv and the transmembrane domain is varied as indicated. FIG. 107A shows impedance as a function of time for the various CAR T cells that were tested. FIG. 107B shows the same data but wherein the slope of the trace is graphed as a function of time.

[0221] FIGS. 108A-108P show photographs of a cell binding assay in which cells were transduced with CARs having variable length linker regions between the antibody fragment and the transmembrane domain. The CAR-transduced cells carry a GFP fluorescent maker so are green. MUC1* positive cancer cells that have been stained red with CMTMR dye are then added to the CAR expressing cells. The degree to which the CARs are able to recognize their target on cancer cells is reflected by the amount of yellow (green plus red). FIG. 108A is the control, untransduced cells. FIG. 108B cells were transduced with CAR44 where the linker region is derived from CD8 extra cellular domain. FIG. 108C shows a CAR with a linker that is a portion of an antibody Fc region. FIG. 108D shows a CAR with a linker that is a portion of an antibody Fc region, minus its hinge region. FIG. 108E shows a CAR with a linker that is a 4-repeat flexible linker sequence. FIG. 108F shows a CAR with a linker that is a portion of an IgD antibody. FIG. 108G shows a CAR with a linker that is a portion of an IgD antibody plus an Fc region. FIG. 108H shows a CAR with a linker that is a portion of an IgD antibody plus an Fc region devoid of its hinge region. FIGS. 1081-108M show photographs of CAR expressing cells after incubation with MUC1* expressing cancer cells, after sufficient wash steps.

[0222] Table 1 shows details of many of the anti-MUC1* CARs that were generated and tested. For each construct shown, a number assigned to that CAR, promoter used, signal peptide, antibody species, sequences of scFv, hinge region, transmembrane domain, and signaling motifs used in each CAR, length of the insert in number of base pairs, its molecular weight and the length of the construct are displayed.

[0223] Table 2 shows cytokine release data for some of the CARs after transduction into human T cells and co-cultured with a variety of cancer cells.

### DETAILED DESCRIPTION OF THE PREFERRED EMBODIMENTS

[0224] In the present application, “a” and “an” are used to refer to both single and a plurality of objects.

[0225] As used herein, occasionally, in short hand, a polypeptide is indicated as being “transduced or transfected” into a cell. In these occurrences, it is understood that the nucleic acid encoding the polypeptide sequence is transduced or transfected into the cell, as it is an impossibility that a polypeptide could be transduced or transfected into a cell.

[0226] As used herein, occasionally when referring to number of cells injected into an animal or otherwise contextually wherein the number of cells is referred to, “M” refers to millions, and “K” refers to thousands.

[0227] As used herein, interchangeable designations for various monoclonal antibodies are used, such as, “MN-C2”, which is interchangeable with “C2”, “Min-C2” and “MNC2”; “MN-E6”, which is interchangeable with “E6”, “Min-E6” and “MNE6”; “MN-C3”, which is interchangeable with “C3”, “Min-C3” and “MNC3”; and “MN-C8”, which is interchangeable with “C8”, “Min-C8” and “MNC8”.

[0228] As used herein, “h” or “hu” placed before an antibody construct is short-hand for humanized.

[0229] As used herein, the term “antibody-like” means a molecule that may be engineered such that it contains portions of antibodies but is not an antibody that would naturally occur in nature. Examples include but are not limited to CAR (chimeric antigen receptor) T cell technology and the Ylanthia® technology. The CAR technology uses an antibody epitope fused to a portion of a T cell so that the body's immune system is directed to attack a specific target protein or cell. The Ylanthia® technology consists of an “antibody-like” library that is a collection of synthetic human Fabs that are then screened for binding to peptide epitopes from target proteins. The selected Fab regions can then be engineered into a scaffold or framework so that they resemble antibodies.

[0230] As used herein, “PSMGFR” is abbreviation for Primary Sequence of the MUC1 Growth Factor Receptor which is identified by SEQ ID NO:2, and thus is not to be confused with a six amino acid sequence. “PSMGFR peptide” or “PSMGFR region” refers to a peptide or region that incorporates the Primary Sequence of the MUC1 Growth Factor Receptor (SEQ ID NO:2).

[0231] As used herein, the “MUC1*” extra cellular domain is defined primarily by the PSMGFR sequence (GTINVHDVETQFNQYKTEAASRYNLTISDVSVSDVPFPFSAQSGA (SEQ ID NO:2)). Because the exact site of MUC1 cleavage depends on the enzyme that clips it, and that the cleavage enzyme varies depending on cell type, tissue type or the time in the evolution of the cell, the exact sequence of the MUC1* extra cellular domain may vary at the N-terminus.

[0232] Other clipped amino acid sequences may include SNIKFRPGSVVVQLTLAFREGTINVHDVETQFNQYKTEAASRY (SEQ ID NO:620); or SVVVQLTLAFREGTINVHDVETQFNQYKTEAASRY (SEQ ID NO:621).

[0233] As used herein, the term “PSMGFR” is an acronym for Primary Sequence of MUC1 Growth Factor Receptor as set forth as GTINVHDVETQFNQYKTEAASRYNLTISDVSVSDVPFPFSAQSGA (SEQ ID NO:2). In this regard, the “N-number” as in “N-10 PSMGFR”, “N-15 PSMGFR”, or “N-20 PSMGFR” refers to the number of amino acid residues that have been deleted at the N-terminal end of PSMGFR. Likewise “C-number” as in “C-10 PSMGFR”, “C-15 PSMGFR”, or “C-20 PSMGFR” refers to the number of amino acid residues that have been deleted at the C-terminal end of PSMGFR.

[0234] As used herein, the “extracellular domain of MUC1*” refers to the extracellular portion of a MUC1 protein that is devoid of the tandem repeat domain. In most cases, MUC1* is a cleavage product wherein the MUC1* portion consists of a short extracellular domain devoid of tandem repeats, a transmembrane domain and a cytoplasmic tail. The precise location of cleavage of MUC1 is not known perhaps because it appears that it can be cleaved by more than one enzyme. The extracellular domain of MUC1* will include most of the PSMGFR sequence but may have an additional 10-20 N-terminal amino acids.

[0235] As used herein “sequence identity” means homology in sequence of a particular polypeptide or nucleic acid to a reference sequence of nucleic acid or amino acid such that the function of the homologous peptide is the same as the reference peptide or nucleic acid. Such homology can be so close with the reference peptide such that at times the two sequences may be 90%, 95% or 98% identical yet possess the same function in binding or other biological activities.

[0236] As used herein, “MUC1 positive” cell refers to a cell that expresses a gene for MUC1, MUC1-Y or MUC1-Z or other MUC1 variant.

[0237] As used herein, “MUC1 negative” cell refers to a cell that does not express a gene for MUC1.

[0238] As used herein, “MUC1* positive” cell refers to a cell that expresses a gene for MUC1, wherein that gene's expressed protein is a transmembrane protein that is devoid of tandem repeats, which may be a consequence of post-translational modification, cleavage, alternative splicing, or transfecting or transducing a cell with a MUC1 protein that is devoid of tandem repeats.

[0239] As used herein, “MUC1* negative” cell refers to a cell that may or may not express a gene for MUC1 but does not express a MUC1 transmembrane protein that is devoid of tandem repeats.

[0240] As used herein, “MUC1 positive” cancer cell refers to a cancer cell that overexpresses the gene for MUC1, expresses MUC1 in an aberrant pattern, wherein its expression is not restricted to the apical border and/or expresses a MUC1 that is devoid of tandem repeats.

[0241] As used herein, “MUC1 negative” cancer cell refers to a cancer cell that may or may not express a gene for MUC1 but does not overexpress MUC1 or does not overexpress a MUC1 transmembrane protein that is devoid of tandem repeats.

[0242] As used herein, “MUC1* positive” cancer cell refers to a cancer cell that overexpresses a MUC1 transmembrane protein that is devoid of tandem repeats.

[0243] As used herein, “MUC1* negative” cancer cell refers to a cancer cell that may or may not express a gene for MUC1 but does not overexpress a MUC1 transmembrane protein that is devoid of tandem repeats.

[0244] MUC1* Antibodies (Anti-PSMGFR) for Treatment or Prevention of Cancers

[0245] We discovered that a cleaved form of the MUC1 (SEQ ID NO:1) transmembrane protein is a growth factor receptor that drives the growth of over 75% of all human cancers. The cleaved form of MUC1, which we called MUC1* (pronounced muk 1 star), is a powerful growth factor receptor. Enzymatic cleavage releases the bulk of the MUC1 extracellular domain. It is the remaining portion comprising a truncated extracellular domain, transmembrane domain and cytoplasmic tail that is called MUC1*. Cleavage and release of the bulk of the extracellular domain of MUC1 unmasks a binding site for activating ligands dimeric NME1, NME6, NME8, NME7-AB, NME7-X1 or NME7. Cell growth assays show that it is ligand-induced dimerization of the MUC1* extracellular domain that promotes growth (FIGS. 1A-1D). MUC1* positive cells treated with either bivalent ‘bv’ anti-MUC1* antibody, monovalent ‘my’ or Fab, NM23-H1 dimers or NME7-AB. Bivalent anti-MUC1* antibodies stimulate growth of cancer cells whereas the monovalent Fab inhibits growth. Classic bell-shaped curve indicates ligand induced dimerization stimulates growth. Dimeric NM23-H1, aka NME1, stimulates growth of MUC1* positive cancer cells but siRNA to suppress MUC1 expression eliminate its effect (FIG. 1C). NME7-AB also stimulates the growth of MUC1* positive cells (FIG. 1D).

[0246] MUC1* is an excellent target for cancer drugs as it is aberrantly expressed on over 75% of all cancers and is likely overexpressed on an even higher percentage of metastatic cancers. After MUC1 cleavage, most of its extracellular domain is shed from the cell surface. The remaining portion has a truncated extracellular domain that at least comprises the primary growth factor receptor sequence, PSMGFR (SEQ ID NO:2). Antibodies that bind to the PSMGFR sequence and especially those that competitively inhibit the binding of activating ligands such as NME proteins, including NME1, NME6, NME8, NME7AB, NME7-X1 and NME7, are ideal therapeutics and can be used to treat or prevent MUC1 positive or MUC1* positive cancers, as stand-alone antibodies, antibody fragments or variable region fragments thereof incorporated into bispecific antibodies, or chimeric antigen receptors also called CARs, which are then transfected or transduced into immune cells, then administered to a patient.

[0247] Therapeutic anti-MUC1* antibodies can be monoclonal, polyclonal, antibody mimics, engineered antibody-like molecules, full antibodies or antibody fragments. Examples of antibody fragments include but are not limited to Fabs, scFv, and scFv-Fc. Human or humanized antibodies are preferred for use in the treatment or prevention of cancers. In any of these antibody-like molecules, mutations can be introduced to prevent or minimize dimer formation. Anti-MUC1* antibodies that are monovalent or bispecific are preferred because MUC1* function is activated by ligand induced dimerization. Typical binding assays show that NME1 and NME7-AB bind to the PSMGFR peptide portion of MUC1* (FIGS. 2A, 2D). Further, they show that these activating growth factors bind to the membrane proximal portion of MUC1*, as they do not bind to the PSMGFR peptide if the 10 C-terminal amino acids are missing. Similarly, anti-MUC1* antibodies MN-C2 and MN-E6 bind to the PSMGFR peptide if an only if the 10 C-terminal amino acids are present (FIGS. 2B, 2C). Antibodies MN-C3 and MN-C8 bind to epitopes that are different from MN-C2 and MN-E6, as they do not depend on the presence of the 10 C-terminal amino acids of the PSMGFR peptide (FIGS. 2E, 2F). Antibodies MN-C2, MN-E6, MN-C3 or MN-C8, or fragments derived from them, can be administered to a patient for the treatment or prevention of cancers, as stand-alone antibodies or incorporated into bispecific antibodies, BiTEs or chimeric antigen receptors also called CARs that have been transduced into immune cells. MNC2 and MNE6 and other anti-MUC1* antibodies that competitively inhibit the binding of NME1 and NME7-AB are preferred for use as stand alone antibody therapeutics.

[0248] Therapeutic anti-MUC1* antibodies for use as a stand alone antibody therapeutic or for integration into a BiTE or a CAR can be selected based on specific criteria. The parent antibody can be generated using typical methods for generating monoclonal antibodies in animals. Alternatively, they can be selected by screening antibody and antibody fragment libraries for their ability to bind to a MUC1* peptide, which can be the PSMGFR peptide (SEQ ID NO:2), SNIKFRPGSVVVQLTLAFREGTINVHDVETQFNQYKTEAASRY (SEQ ID NO:620); or SVVVQLTLAFREGTINVHDVETQFNQYKTEAASRY (SEQ ID NO:621).

[0249] Resultant antibodies or antibody fragments generated or selected in this way can then be further selected by passing additional screens. For example, antibodies or antibody fragments become more preferred based on their ability to bind to MUC1* positive cancer cells or tissues but not to MUC1 negative cancer cells or to normal tissues. Further, anti-MUC1* antibodies or antibody fragments may be de-selected as anti-cancer therapeutics if they bind to stem or progenitor cells. Anti-MUC1* antibodies or antibody fragments become more preferred if they have the ability to competitively inhibit the binding of activating ligands to MUC1*. FIGS. 3A-3C shows that MN-E6 and MN-C2 competitively inhibit the binding of activating ligands NME1 and NME7 to MUC1*.

[0250] A process for selecting anti-MUC1* antibodies for use in treating a patient diagnosed with a MUC1 positive cancer, at risk of developing a MUC1 positive cancer or suspected of having a MUC1 positive cancer comprises one or more of the following steps of selecting antibodies or antibody fragments that 1) bind to the PSMGFR peptide; 2) bind to the N-10 PSMGFR peptide; 3) bind to cancer cells; 4) do not bind to stem or progenitor cells; and 5) competitively inhibited the binding of dimeric NME1 or NME7-AB to the PSMGFR peptide. For example, FIGS. 3A-3C show that monoclonals MN-E6 and MN-C2 satisfy all five criteria, while monoclonals MN-C3 and MN-C8 do not competitively inhibit the binding of activating ligands NME1 and NME7 (FIG. 3C). However, antibodies or antibody fragments derived from MN-C3 and MN-C8 are equally potent as anti-cancer agents when integrated into a BiTE or a CAR as in these methods, the killing effect of the immune cells is more important than the ability to inhibit the binding of activating ligands. In addition, toxic agents conjugated to MN-E6, MN-C2, MN-C3 or MN-C8 are potent anti-cancer therapeutics. Recall that the MUC1* growth factor receptor is activated by ligand-induced dimerization of its extracellular domain. Therefore, the ideal antibody therapeutic should not dimerize the MUC1* extracellular domain. Preferably, suitable antibodies in this regard include monovalent antibodies such as those generated in lamas and camels, Fabs, scFv's, single domain antibodies (sdAb), scFv-Fc as long as the Fc portion is constructed such that it does not homo-dimerize.

[0251] FACS scans show that anti-MUC1* antibodies MN-C2 and MN-E6 specifically bind to MUC1* positive solid tumor cancer cells and MUC1* transfected cells but not MUC1* negative or MUC1 negative cells. MNC3 and MNC8 bind to blood progenitor cells as well as to blood cancer cells, since these diseases are characterized by the inability of blood progenitor cells to terminally differentiate. Therefore, MNC3 and MNC8 are preferred for the treatment of blood cancers, as stand alone therapeutics, BiTEs or CAR T therapeutics. In one example, a humanized MN-C2 scFv is shown to bind to ZR-75-1, aka 1500, MUC1* positive breast cancer cells (FIGS. 4A-4C). MN-E6 was shown to bind to MUC1 negative HCT-116 colon cancer cells if an only if they were transfected with MUC1*. MN-E6 also bound to MUC1* positive cancer cells such as ZR-75-1, aka 1500, MUC1* positive breast cancer cells (FIGS. 4D-4F). Binding assays such as ELISAs, immunofluorescence, and the like all confirm that MN-C2 and MN-E6 bind to the PSMGFR peptide and to live MUC1 positive cancer cells. Humanized anti-MUC1* antibodies are selected based on their ability to also bind to the PSMGFR peptide or to MUC1 positive cancer cells. FIG. 5 shows that humanized MN-C2 scFv binds with high affinity to the MUC1* peptide PSMGFR with an EC-50 of about 333 nM. Humanized MN-C2 scFv, like Fabs, potently inhibits the growth of MUC1* positive cancer cells as is shown in one example in FIGS. 6A, 6B.

[0252] The Fabs of MN-E6 and MN-C2 or the comparable single chain variable regions derived from them potently inhibit the growth of MUC1* positive cancers in vitro and in vivo. In several examples, the Fabs of Anti-MUC1* antibodies inhibited the growth of human MUC1* positive cancers in vivo. In one case, immune-compromised mice were implanted with human breast tumors then treated with MN-E6 Fab after tumor engraftment. FIG. 7A shows that MN-E6 Fab potently inhibited the growth of MUC1* positive breast cancers. Female nu/nu mice implanted with 90-day estrogen pellets were implanted with 6 million T47D human breast cancer cells that had been mixed 50/50 with Matrigel. Mice bearing tumors that were at least 150 mm\hat{ }3 and had three successive increases in tumor volume were selected for treatment. Animals were injected sub-cutaneously twice per week with 80 mg/kg MN-E6 Fab and an equal number of mice fitting the same selection criteria were injected with vehicle alone (FIG. 7A).

[0253] In another aspect, MN-E6 was shown to halt the growth of prostate cancer. FIG. 7B shows that MN-E6 Fab potently inhibited the growth of MUC1* positive prostate cancers. Male NOD/SCID mice were implanted with 6 million DU-145 human prostate cancer cells that had been mixed 50/50 with Matrigel. Mice bearing tumors that were at least 150 mm\hat{ }3 and had three successive increases in tumor volume were selected for treatment. Animals were injected sub-cutaneously every 48 hours with 160 mg/kg MN-E6 Fab and an equal number of mice fitting the same selection criteria were injected with vehicle alone (FIG. 7B). Tumors were measured independently by two researchers twice per week and recorded. Statistics were blindly calculated by independent statistician, giving a P value of 0.0001 for each. Anti-MUC1* Fab inhibited breast cancer growth and prostate cancer growth. Treatment had no effect on weight, bone marrow cell type or number. The MN-E6 Fab effectively inhibited the growth of the tumors, while the control group's tumors continued to grow until sacrifice. No adverse effects of treatment were observed or detected.

[0254] Recombinant forms of MN-E6 and MINERVA-C2 were constructed that like the Fab are monomeric. In this case, MN-E6 was humanized and MINERVA-C2 was humanized. There are a number of methods known to those skilled in the art for humanizing antibodies. In addition to humanizing, libraries of human antibodies can be screened to identify other fully human antibodies that bind to the PSMGFR. FIG. 8 is a graph of an ELISA assay showing differing levels of expression of humanized MN-E6 anti-MUC1* antibody depending on whether the light chain was kappa or lambda and whether the variable portion was fused to a human IgG1 or IgG2. FIG. 9 is a graph of an ELISA assay comparing the binding of the parent mouse MN-E6 antibody to the humanized versions of the MN-E6 antibody to a surface presenting the PSMGFR peptide derived from the MUC1* extracellular domain. FIG. 10 is a graph of an ELISA assay showing differing levels of expression of humanized MN-C2 anti-MUC1* antibody depending on whether the light chain was kappa or lambda and whether the variable portion was fused to a human IgG1 or IgG2. FIG. 11 is a graph of an ELISA assay comparing the binding of the parent mouse MN-C2 antibody to the humanized versions of the MN-C2 antibody to a surface presenting the PSMGFR peptide derived from the MUC1* extracellular domain. FIG. 12 is a graph of an ELISA assay showing binding of humanized single chain (scFv) MN-C2 and MN-E6 antibodies binding to a surface presenting the PSMGFR peptide derived from the MUC1* extracellular domain.

[0255] A single chain of the humanized MN-E6 variable region, called an scFv, was genetically engineered such that it was connected to the Fc portion of the antibody (SEQ ID NO:256 and 257). Fc regions impart certain benefits to antibody fragments for use as therapeutics. The Fc portion of an antibody recruits complement, which in general means it can recruit other aspects of the immune system and thus amplify the anti-tumor response beyond just inhibiting the target. The addition of the Fc portion also increases the half-life of the antibody fragment (Czajkowsky D M, Hu J, Shao Z and Pleass R J. (2012) Fc-fusion proteins: new developments and future perspectives. EMBO Mol Med. 4(10):1015-1028).

[0256] However, the Fc portion of an antibody homo-dimerizes, which in the case of anti-MUC1* antibody based therapeutics is not optimal since ligand-induced dimerization of the MUC1* receptor stimulates growth. As can be seen in FIG. 13 B, humanized MN-E6 scFv-Fc is a dimer, in part due to disulfide bonding. Therefore, mutations in the Fc region that resist dimer formation are preferred for anti-MUC1* anti-cancer therapeutics. Deletion of the hinge region (hingeless also called delta hinge or Dhinge in some figures and examples SEQ ID NO: 288 and 289) and other mutations in the Fc region that make the Fc-mutant resistant to dimerization were made. The following mutations were made in the CH3 domain to create a monomeric scFv-Fc fusion protein: Y407R (SEQ ID NO: 278 and 279), F405Q (SEQ ID NO: 280 and 281), T394D (SEQ ID NO: 282 and 283), T366W/L368W (SEQ ID NO: 284 and 285), T364R/L368R (SEQ ID NO: 286 and 287). FIG. 14 shows photographs of SDS-PAGE characterization of purified MN-E6 scFv-Fc fusion proteins on a non-reducing gels, wherein the Fc portion that was fused to the MN-E6 was either wild type (wt) or mutated as follows: A) F405Q, Y407R, T394D; B) T366W/L368W, T364R/L368R, T366W/L368W or T364R/L368R. Fc mutants F405Q, Y407R, T366W/L368W, T364R/L368R, T366W/L368W and T364R/L368R all favored monomer over dimer formation. FIG. 15 shows FPLC traces of the purification of MN-E6 scFv-Fc Y407Q fusion protein that was grown in low IgG FBS over a Protein A affinity column. A) is the trace of the flow through. B) is the trace of the elution. The protein was further purified by size exclusion over an S200 column (C). (D) is a photograph of an SDS-PAGE gel showing which fractions had a predominance of monomer. FIG. 16 shows a photograph of SDS-PAGE characterization of purified MN-E6 scFv-Fc-mutant fusion proteins on a non-reducing gel, wherein the Fc portion that was fused to the MN-E6 scFv was either wild type (wt) or mutated by elimination of the hinge region, ‘DHinge’, of the Fc or elimination of the hinge region of the Fc and also bearing the Y407R mutation. All the Fc mutants favored monomer over dimer formation. The reference construct amino acid sequence for the indicated mutation is SEQ ID NO:273. Other relevant sequences are SEQ ID NOS:289 and 279. FIG. 17A and FIG. 17B show photograph of non-reducing SDS-PAGE characterization of large scale expression and purification of MN-E6 scFv-Fc hingeless mutant, showing that it is a monomer. FPLC characterization and purification of MN-E6 scFv-Fc hingeless mutant is shown (FIG. 17C). FIGS. 18A-18C show photographs of the SDS-PAGE characterization of the purified MN-C3 scFv-Fc fusion protein on a non-reducing gel (FIG. 18A) or a reducing gel (FIG. 18B). The protein was purified by size exclusion. The FPLC trace is shown (FIG. 18C). FIGS. 19A-19B show photographs of Native gels of MN-C3 or MN-E6 Fabs, scFv, scFv-Fc, wherein the Fc portion is wild type or mutants that prefer or are exclusively monomers. Native gels show that the Y407R Fc mutation (FIG. 19A) and the double mutant Y407R and a deleted hinge (FIG. 19B) favor monomer over dimer the best. Note that proteins are loaded onto a gel at much higher concentrations than typical use concentrations. The dimer formation of other Fc mutants may only reflect the fact that loading concentration is very high.

[0257] Some mutations or deletions were so effective that, even when loaded onto a gel at high concentrations, they resist dimer formation (FIGS. 14A, 14B). The Y407R mutation results in a nearly pure population of dimeric scFv-Fc (FIG. 10). Similarly deletions of the hinge region of the Fc result in fusion proteins that are monomers rather than dimers. Combinations of mutations can result in even more effective resistance of dimer formation (FIGS. 16 and 17). These and other mutations and combinations thereof were introduced into CH2-CH3 (SEQ ID NO:274 and 275) and CH3 (SEQ ID NO:276 and 277) fusion proteins such as scFv or in the hingeless Fc-fusion proteins such as scFv and were shown to eliminate or minimize dimerization.

[0258] Like the parent mouse monoclonal antibodies, human or humanized antibodies as well as single chain constructs, scFv's, scFv-Fc fusions or scFv-Fc-mutants specifically bind to the synthetic MUC1* peptides (FIGS. 20-22). FIG. 23 shows a graph of an ELISA assay that quantifies the binding of humanized MN-E6 scFv-Fc-delta hinge, aka Dhinge or hingeless, and humanized MN-E6 scFv to the MUC1* peptide PSMGFR.

[0259] The human or humanized anti-MUC1* antibody fragments described here specifically bind to MUC1 and MUC1* positive cancer cells. FIG. 24 shows photographs of immunofluorescence experiments in which humanized MN-C2 scFv or MN-E6 scFv specifically binds to MUC1* positive breast cancer cells in an identical concentration dependent manner. A-G: hu MN-C2 scFv binding to T47D breast cancer cells at concentrations indicated. H—N shows the fluorescently labeled scFv and DAPI. O-U: hu MN-E6 scFv binding to T47D breast cancer cells at concentrations indicated. V-B′ shows the fluorescently labeled scFv and DAPI. C′ is the secondary antibody control.

[0260] In addition to binding to MUC1* positive cancer cells, the anti-MUC1* antibody variable region fragments, scFv's, scFv-Fc's and scFv-Fc-mutants inhibited growth of MUC1-positive cancer cells. FIGS. 25A-25L show photographs of MUC1* positive breast cancer cells that have been cultured in normal medium or in the presence of humanized MN-E6 scFv. The photographs show killing and/or growth inhibition of MUC1* positive cells by MN-E6 scFv at 5 ug/mL and an even greater effect at 500 ug/mL. FIGS. 26A-26L show photographs of MUC1* positive breast cancer cells that have been cultured in normal medium or in the presence of humanized MN-E6 scFv-Fc Dhinge, which is a hingeless or delta hinge mutant. The photographs show killing and/or growth inhibition of MUC1* positive cells by hMN-E6 scFv-Fc Dhinge 5 ug/mL, an even greater effect at 50 ug/mL and yet an even greater effect at 100 ug/mL. FIG. 27 shows a graph of the image analysis of the fluorescent images of FIGS. 25 and 26. Image J was used to quantify the number of cells remaining after 96 hours treatment in humanized MN-E6scFv or MN-E6 scFv-Fc-delta hinge, aka Dhinge. The analysis software uses pixel counting and pixel fluorescence intensity to quantify the number of cells in each photograph. Analysis was performed over the entire image 512×512 pixels, 8-bit image. For comparison, the inhibition of mouse monoclonal MN-E6 Fab is also analyzed.

[0261] These data show that a human or humanized MN-E6 antibody or antibody fragment, Fab, MN-E6 scFv or hu MN-E6 scFv-Fcₘᵤₜ are effective anti-cancer agents that can be administered to a person diagnosed with a MUC1 or MUC1* positive cancer, suspected of having a MUC1 or MUC1* positive cancer or is at risk of developing a MUC1 or MUC1* positive cancer.

[0262] In these specific examples, the dimer resistant Fc that was fused onto an antibody fragment or scFv is hu MN-E7 scFv. However, any of these Fc region mutations or combinations thereof that eliminate or minimize dimerization can be fused onto variable region fragments or single chain constructs of MN-E6, MN-C2, MN-C3 or MN-C8 or other antibodies identified that selectively bind to MUC1* as it exists on cancer cells or tissues. In addition, the Fabs of these antibodies can be used as an anti-cancer therapeutic. In one aspect of the invention, a person diagnosed with, suspected of having or is at risk of developing a MUC1* or MUC1 positive cancer is treated with an effective amount of human or humanized MN-E6 scFv, MN-C2 scFv, MN-C3 scFv, or MN-C8 scFv. In another aspect of the invention, a person diagnosed with, suspected of having or is at risk of developing a MUC1* or MUC1 positive cancer is treated with an effective amount of human or humanized MN-E6 scFv-Fc_{Y407R}, MN-C2 scFv-Fc_{Y407R}, MN-C3 scFv-Fc_{Y407R}, or MN-C8 scFv-Fc_{Y407R}. In another aspect of the invention, a person diagnosed with, suspected of having or is at risk of developing a MUC1* or MUC1 positive cancer is treated with an effective amount of human or humanized MN-E6 scFv-Fc mutant_{Dhinge}, MN-C2 scFv-Fc mutant_{Dhinge}, MN-C3 scFv-Fc mutant_{Dhinge}, or MN-C8 scFv-Fc mutant_{Dhinge}. In yet another aspect of the invention, a person diagnosed with, suspected of having or is at risk of developing a MUC1* or MUC1 positive cancer is treated with an effective amount of human or humanized MN-E6 scFv-Fc mutant_{Y407R-Dhinge}, MN-C2 scFv-Fc mutant_{Y407R-Dhinge}, MN-C3 scFv-Fc mutant_{Y407R-Dhinge}, or MN-C8 scFv-Fc mutant_{Y407R-Dhinge}. One aspect of the invention is a method for treating a patient diagnosed with, suspected of having, or at risk of developing a MUC1 positive or MUC1* positive cancer, wherein the patient is administered an effective amount of a monomeric MN-E6 scFv, MN-C2 scFv, MN-C3 scFv, MN-C8 scFv, or MN-E6 scFv-Fc, MN-C2 scFv-Fc, MN-C3 scFv-Fc, MN-C8 scFv-Fc, wherein the Fc portion of the antibody-like protein has been mutated such that it resists dimer formation.

[0263] Humanizing

[0264] Humanized antibodies or antibody fragments or fully human antibodies that bind to the extracellular domain of −MUC1* are preferred for therapeutic use. The techniques described herein for humanizing antibodies are but a few of a variety of methods known to those skilled in the art. The invention is not meant to be limited by the technique used to humanize the antibody.

[0265] Humanization is the process of replacing the non-human regions of a therapeutic antibody (usually mouse monoclonal antibody) by human one without changing its binding specificity and affinity. The main goal of humanization is to reduce immunogenicity of the therapeutic monoclonal antibody when administered to human. Three distinct types of humanization are possible. First, a chimeric antibody is made by replacing the non-human constant region of the antibody by the human constant region. Such antibody will contain the mouse Fab region and will contain about 80-90% of human sequence. Second, a humanized antibody is made by grafting of the mouse CDR regions (responsible of the binding specificity) onto the variable region of a human antibody, replacing the human CDR (CDR-grafting method). Such antibody will contain about 90-95% of human sequence. Third and last, a full human antibody (100% human sequence) can be created by phage display, where a library of human antibodies is screened to select antigen specific human antibody or by immunizing transgenic mice expressing human antibody.

[0266] A general technique for humanizing an antibody is practiced approximately as follows. Monoclonal antibodies are generated in a host animal, typically in mice. Monoclonal antibodies are then screened for affinity and specificity of binding to the target. Once a monoclonal antibody that has the desired effect and desired characteristics is identified, it is sequenced. The sequence of the animal-generated antibody is then aligned with the sequences of many human antibodies in order to find human antibodies with sequences that are the most homologous to the animal antibody. Biochemistry techniques are employed to paste together the human antibody sequences and the animal antibody sequences. Typically, the non-human CDRs are grafted into the human antibodies that have the highest homology to the non-human antibody. This process can generate many candidate humanized antibodies that need to be tested to identify which antibody or antibodies has the desired affinity and specificity.

[0267] Once a human antibody or a humanized antibody has been generated it can be further modified for use as an Fab fragment, as a full antibody, or as an antibody-like entity such as a single chain molecule containing the variable regions, such as scFv or an scFv-Fc. In some cases it is desirable to have Fc region of the antibody or antibody-like molecule mutated such that it does not dimerize.

[0268] In addition to methods that introduce human sequences into antibodies generated in non-human species, fully human antibodies can be obtained by screening human antibody libraries with a peptide fragment of an antigen. A fully human antibody that functions like MN-E6 or MN-C2 is generated by screening a human antibody library with a peptide having the sequence of the PSMGFR N-10 peptide. A fully human antibody that functions like MN-C3 or MN-C8 is generated by screening a human antibody library with a peptide having the sequence of the PSMGFR C-10 peptide.

[0269] Humanized anti-MUC1* antibodies were generated based on the sequences of the mouse monoclonal antibodies MN-E6, MN-C2, MN-C3 and MN-C8. In one aspect of the invention, a patient diagnosed with a MUC1* positive cancer is treated with an effective amount of humanized MN-E6, MN-C2, MN-C3 or MN-C8. In a preferred embodiment, a patient diagnosed with a MUC1* positive cancer is treated with an effective amount of humanized MN-E6 or MN-C2. In another aspect of the invention, a patient diagnosed with a MUC1* positive cancer is treated with an effective amount of humanized monovalent MN-E6, MN-C2, MN-C3 or MN-C8, wherein monovalent means the corresponding Fab fragment, the corresponding scFv or the corresponding scFv-Fc fusion. In a preferred embodiment, a patient diagnosed with a MUC1* positive cancer is treated with an effective amount of a humanized scFv or monomeric humanized scFv-Fc of MN-E6 or MN-C2. Since the MUC1* growth factor receptor is activated by ligand induced dimerization of its extracellular domain, and because the Fc portion of an antibody homo-dimerizes, it is preferable that a construct that includes an Fc portion uses a mutated Fc region that prevents or minimizes dimerization.

[0270] Antibodies that bind to PSMGFR (SEQ ID NO:2) peptide of the extracellular domain of the MUC1* receptor are potent anti-cancer therapeutics that are effective for the treatment or prevention of MUC1* positive cancers. They have been shown to inhibit the binding of activating ligands dimeric NME1 (SEQ ID NOS: 3 and 4) and NME7 (SEQ ID NOS: 5 and 6) to the extracellular domain of MUC1*. Anti-MUC1* antibodies that bind to the PSMGFR sequence inhibit the growth of MUC1*-positive cancer cells, specifically if they inhibit ligand-induced receptor dimerization. Fabs of anti-MUC1* antibodies have been demonstrated to block tumor growth in animals. Thus, antibodies or antibody fragments that bind to the extracellular domain of MUC1* would be beneficial for the treatment of cancers wherein the cancerous tissues express MUC1*.

[0271] Antibodies that bind to PSMGFR region of MUC1* or bind to a synthetic PSMGFR peptide are preferred. We have identified several monoclonal antibodies that bind to the extracellular domain of MUC1*. Among this group are mouse monoclonal antibodies MN-E6, MN-C2, MN-C3 and MN-C8, the variable regions of which were sequenced and are given as for MN-E6 SEQ ID NOS: 12-13 and 65-66, for MN-C2 SEQ ID NOS: 118-119 and 168-169, for MN-C3 SEQ ID NOS: 413-414 and 458-459 and for MN-C8 SEQ ID NOS: 505-506 and 543-554. The CDRs of these antibodies make up the recognition units of the antibodies and are the most important parts of the mouse antibody that should be retained when grafting into a human antibody. The sequences of the CDRs for each mouse monoclonal are as follows, heavy chain sequence followed by light chain: MN-E6 CDR1 (SEQ ID NO:16-17 and 69-70) CDR2 (SEQ ID NO:20-21 and 73-74) CDR3 (SEQ ID NO: 24-25 and 77-78), MN-C2 CDR1 (SEQ ID NO:122-123 and 172-173) CDR2 (SEQ ID NO:126-127 and 176-177) CDR3 (SEQ ID NO:130-131 and 180-181), MN-C3 CDR1 (SEQ ID NO:417-418 and 462-463) CDR2 (SEQ ID NO:421-422 and 466-467) CDR3 (SEQ ID NO:425-426 and 470-471), MN-C8 CDR1 (SEQ ID NO:507-508 and 545-546) CDR2 (SEQ ID NO:509-510 and 547-548) CDR3 (SEQ ID NO:511-512 and 549-550). In some cases, portions of the framework regions that by modeling are thought to be important for the 3-dimensional structure of the CDRs, are also imported from the mouse sequence.

[0272] Monoclonal antibodies MN-E6 and MN-C2 have greater affinity for MUC1* as it appears on cancer cells. Monoclonal antibodies MN-C3 and MN-C8 have greater affinity for MUC1* as it appears on stem cells. By sequence alignment the following human antibodies were chosen as being sufficiently homologous to the mouse antibody that substitution of the mouse CDRs would result in an antibody that retained ability to recognize the target. Mouse MN-E6 heavy chain variable region was homologous to human IGHV3-21*03 heavy chain variable region (SEQ ID NO: 26-27) and the light chain variable region was homologous to human IGKV3-11*02 light chain variable region (SEQ ID NO: 79-80). Mouse MN-C2 heavy chain variable region was homologous to human IGHV3-21*04 heavy chain variable region (SEQ ID NO: 132-133) and the light chain variable region was homologous to human IGKV7-3*01 light chain variable region (SEQ ID NO: 182-183). Mouse MN-C3 heavy chain variable region was homologous to human IGHV1-18*04 heavy chain variable region (SEQ ID NO: 427-428) and the light chain variable region was homologous to human IGKV2-29*03 light chain variable region (SEQ ID NO:472-473). Mouse MN-C8 heavy chain variable region was homologous to human IGHV3-21*04 heavy chain variable region (SEQ ID NO: 513-514) and the light chain variable region was homologous to human Z00023 light chain variable region (SEQ ID NO:551-552).

[0273] All four antibodies have been humanized, which process has resulted in several humanized forms of each antibody. CDRs derived from the variable regions of the mouse antibodies were biochemically grafted into a homologous human antibody variable region sequence. Humanized variable regions of MN-E6 (SEQ ID NOS: 38-39 and 93-94), MN-C2 (SEQ ID NOS: 144-145 and 194-195), MN-C3 (SEQ ID NOS: 439-440 and 486-487) and MN-C8 (SEQ ID NOS: 525-526 and 543-544) were generated by grafting the mouse CDRs into the variable region of a homologous human antibody. The humanized heavy chain variable constructs were then fused into constant regions of either human IgG1 heavy chain constant region (SEQ ID NOS:58-59) or human IgG2 heavy chain constant region (SEQ ID NO:54-55), which are then paired with either humanized light chain variable constructs fused to a human kappa chain (SEQ ID NO: 109-110) or human lambda chain (SEQ ID NO: 113-114) constant region. Other IgG isotypes could be used as constant region including IgG3 or IgG4.

[0274] Examples of humanized MN-E6 variable region into an IgG2 heavy chain (SEQ ID NOS:52-53) and into an IgG1 heavy chain (SEQ ID NOS:56-57), humanized MN-C2 variable into an IgG1 heavy chain (SEQ ID NOS: 158-159) or into an IgG2 heavy chain (SEQ ID NOS: 163-164) paired with either Lambda light chain (SEQ ID NO: 111-112 and 216-219) or Kappa chain (SEQ ID NO:107-108 and 210-213) and, humanized MN-C3 (SEQ ID NOS: 455-456, 453-454 and 500-501, 502-503) and MN-C8 (SEQ ID NOS: 541-542, 539-540 and 579-580, 581-582) antibodies were generated. Which IgG constant region is fused to the humanized variable region depends on the desired effect since each isotype has its own characteristic activity. The isotype of the human constant region is selected on the basis of things such as whether antibody dependent cell cytotoxicity (ADCC) or complement dependent cytotoxicity (CDC) is desired but can also depend on the yield of antibody that is generated in cell-based protein expression systems. In a preferred embodiment, humanized anti-MUC1* antibodies or antibody fragments are administered to a person diagnosed with or at risk of developing a MUC1-positive cancer.

[0275] One method for testing and selecting the humanized anti-MUC1* antibodies that would be most useful for the treatment of persons with cancer or at risk of developing cancers is to test them for their ability to inhibit the binding of activating ligands to the MUC1* extracellular domain. Dimeric NME1 can bind to and dimerize the MUC1* extracellular domain and in so doing stimulates cancer cell growth. Antibodies and antibody fragments that compete with NME1 for binding to the MUC1* extracellular domain are therefore anti-cancer agents. NME7 is another activating ligand of MUC1*. In some cases, it is preferable to identify antibodies that block the binding of NME7, or an NME7 truncation or cleavage product, to the MUC1* extracellular domain. Antibodies and antibody fragments that compete with NME7 and NME7 variants for binding to the MUC1* extracellular domain are effective as anti-cancer therapeutics. These antibodies include but are not limited to MN-E6, MN-C2, MN-C3, MN-C8 as well as single chain versions, such as scFv, of these antibodies and humanized version thereof. Other NME proteins also bind to MUC1 or MUC1* including NME6 and NME8. Antibodies that compete with these proteins for binding to MUC1* may also be useful as therapeutics. In a preferred embodiment, humanized anti-MUC1* antibodies or antibody fragments are administered to a person diagnosed with or at risk of developing a MUC1-positive cancer. In a more preferred embodiment, single chain antibody fragments, or monomeric scFv-Fc fusions, derived from humanized sequences of MN-E6 and MN-C2 are administered to a person diagnosed with or at risk of developing a MUC1-positive cancer.

[0276] Single chain variable fragments, scFv, or other forms that result in a monovalent antibody or antibody-like protein are also useful. In some cases it is desired to prevent dimerization of the MUC1* extracellular domain. Single chain variable fragments, Fabs and other monovalent antibody-like proteins have been shown to be effective in binding to the extracellular domain of MUC1* and blocking MUC1* dimerization. These single chain variable fragments, Fabs and other monovalent antibody-like molecules effectively blocked cancer growth in vitro and in animals xenografted with human MUC1-positive cancer cells. Thus, humanized single chain variable fragments or monovalent anti-MUC1* antibodies or antibody-like molecules would be very effective as an anti-cancer therapeutic. Such humanized single chain antibodies, Fabs and other monovalent antibody-like molecules that bind to the MUC1* extracellular domain or to a PSMGFR peptide are therefore useful as anti-cancer therapeutics. Anti-MUC1* single chain variable fragments are generated by grafting non-human CDRs of antibodies, which bind to extracellular domain of MUC1* or bind to PSMGFR peptide, into a framework of a homologous variable region human antibody. The resultant humanized heavy and light chain variable regions are then connected to each other via a suitable linker, wherein the linker should be flexible and of length that it allows heavy chain binding to light chain but discourages heavy chain of one molecule binding to the light chain of another. For example a linker of about 10-15 residues. Preferably, the linker includes [(Glycine)₄ (Serine)₁]₃ (SEQ ID NOS: 401-402), but is not limited to this sequence as other sequences are possible.

[0277] In one aspect, the humanized variable regions of MN-E6 (SEQ ID NOS: 38-39 and 93-94), MN-C2 (SEQ ID NOS: 144-145 and 194-195), MN-C3 (SEQ ID NOS: 439-440 and 486-487) and MN-C8 (SEQ ID NOS: 525-526 and 565-566) are biochemically grafted into a construct that connects heavy and light chains via a linker. Examples of humanized single chain anti-MUC1* antibodies comprising humanized sequences from the variable regions of MN-E6, MN-C2, MN-C3 and MN-C8 were generated. Several humanized MN-E6 single chain proteins were generated (SEQ ID NOS: 232-237). Several humanized MN-C2 single chain proteins were generated (SEQ ID NOS: 238-243). Several humanized MN-C3 single chain proteins were generated (SEQ ID NOS: 244-249). Several humanized MN-C8 single chain proteins were generated (SEQ ID NOS: 250-255). In a preferred embodiment, humanized anti-MUC1* antibody fragments, including variable fragments, scFv antibody fragments MN-E6 scFv, MN-C2 scFv, MN-C3 scFv, or MN-C8 scFv are administered to a person diagnosed with or at risk of developing a MUC1-positive cancer. In a more preferred embodiment, single chain antibody fragments, such as variable fragments derived from humanized sequences of MN-E6 and MN-C2, are administered to a person diagnosed with or at risk of developing a MUC1-positive cancer.

[0278] In another aspect, the humanized variable regions of MN-E6 (SEQ ID NOS: 38-39 and 93-94), MN-C2 (SEQ ID NOS: 144-145 and 194-195), MN-C3 (SEQ ID NOS: 439-440 and 486-487) and MN-C8 (SEQ ID NOS: 525-526 and 565-566) are biochemically grafted into a single chain variable fragment, scFv, that also contains an Fc portion of an antibody. Examples of humanized single chain variable fragment of MN-E6, MN-C2, MN-C3 and MN-C8 fused to a Fc region of an antibody were generated (SEQ ID NOS: 256-257, 260-261, 264-265 and 268-269). Inclusion of an Fc region serves several purposes. It increases the molecular weight of the antibody fragment, which slows degradation and increases half-life. An Fc region also recruits immune system complement to the tumor site. Additionally, the addition of an antibody Fc region makes the scFv a convenient diagnostic tool, as the secondary antibodies detect and label the Fc portion. However, the Fc portion homo-dimerizes. Thus an scFv-Fc would be bivalent and could dimerize and activate the MUC1* growth factor receptor. In order to get the benefits of having an Fc attached to an anti-MUC1* scFv, without the drawback of inducing MUC1* dimerization, the Fc region was mutated to minimize or eliminate Fc homo-dimerization. The following mutations were made in the CH3 domain to create a monomeric scFv-Fc fusion protein: Y407R (SEQ ID NOS: 278 and 279), F405Q (SEQ ID NOS: 280 and 281), T394D (SEQ ID NOS: 282 and 283), T366W/L368W (SEQ ID NOD: 284 and 285), T364R/L368R (SEQ ID NOS: 286 and 285). Any combinations of those mutations can be tested and could be introduced into Fc (SEQ ID NOS: 272-273), CH2-CH3 (SEQ ID NOS: 274-275) or CH3 (SEQ ID NOS: 276-277) fusion proteins or in the hingeless Fc-fusion proteins (SEQ ID NOS: 288-289).

[0279] One aspect of the invention is a method for treating a patient diagnosed with, suspected of having, or at risk of developing a MUC1 positive or MUC1* positive cancer, wherein the patient is administered an effective amount of a monomeric MN-E6 scFv, MN-C2 scFv, MN-C3 scFv, MN-C8 scFv, or MN-E6 scFv-Fc, MN-C2 scFv-Fc, MN-C3 scFv-Fc, MN-C8 scFv-Fc, wherein the antibody variable fragment portions are human or have been humanized and wherein the Fc portion of the antibody-like protein has been mutated such that it resists dimer formation.

[0280] CAR T and Cancer Immunotherapy Techniques

[0281] In another aspect of the invention, some or all of the single chain portions of anti-MUC1* antibody fragments are biochemically fused onto immune system molecules, using several different chimeric antigen receptor, ‘CAR’ strategies. The idea is to fuse the recognition portion of an antibody, typically as a single chain variable fragment, to an immune system molecule that has a transmembrane domain and a cytoplasmic tail that is able to transmit signals that activate the immune system. The recognition unit can be an antibody fragment, a single chain variable fragment, scFv, or a peptide. In one aspect, the recognition portion of the extracellular domain of the CAR is comprised of sequences from the humanized variable region of MN-E6 (SEQ ID NOS: 38-39 and 93-94), MN-C2 (SEQ ID NOS: 144-145 and 194-195), MN-C3 (SEQ ID NOS: 439-440 and 486-487) and MN-C8 (SEQ ID NOS: 525-526 and 565-566). In another aspect, it is comprised of sequences from a single chain variable fragment. Examples of single chain constructs are given. Several humanized MN-E6 single chain proteins, scFv, were generated (SEQ ID NOS: 232-237). Several humanized MN-C2 single chain proteins, scFv, were generated (SEQ ID NOS: 238-243). Several humanized MN-C3 single chain proteins, scFv, were generated (SEQ ID NOS: 244-249). Several humanized MN-C8 single chain proteins, scFv, were generated (SEQ ID NOS: 250-255). The transmembrane region of the CAR can be derived from CD8, CD4, antibody domains or other transmembrane region, including the transmembrane region of the proximal cytoplasmic co-stimulatory domain, such as CD28, 4-1BB or other. The cytoplasmic tail of the CAR can be comprised of one or more motifs that signal immune system activation. This group of cytoplasmic signaling motifs, sometimes referred to as, co-stimulatory cytoplasmic domains, includes but is not limited to CD3-zeta, CD27, CD28, 4-1BB, OX40, CD30, CD40, ICAm-1, LFA-1, ICOS, CD2, CD5, CD7 and Fc receptor gamma domain. A minimal CAR may have the CD3-zeta or an Fc receptor gamma domain then one or two of the above domains in tandem on the cytoplasmic tail. In one aspect, the cytoplasmic tail comprises CD3-zeta, CD28, 4-1BB and/or OX40.

[0282] Table 1 lists many of the anti-MUC1* CARs that we generated and tested. Several examples of MN-E6 CARs were generated: CAR MN-E6 CD3z (SEQ ID NOS: 294-295); CAR MN-E6 CD28/CD3z (SEQ ID NOS: 297-298); CAR MN-E6 4-1BB/CD3z (SEQ ID NOS: 300-301); CAR MN-E6 OX40/CD3z (SEQ ID NOS: 616-617); CAR MN-E6 CD28/OX40/CD3z (SEQ ID NOS: 618-619); CAR MN-E6 CD28/4-1BB/CD3z (SEQ ID NOS: 303-304). Several examples of humanized MN-C2 CARs were generated: CAR MN-C2 CD3z (SEQ ID NOS: 606-607); CAR MN-C2 CD28/CD3z (SEQ ID NOS: 608-609); CAR MN-C2 4-1BB/CD3z (SEQ ID NOS: 610-611); CAR MN-C2 OX40/CD3z (SEQ ID NOS: 612-613); CAR MN-C2 CD28/4-1BB/CD3z (SEQ ID NOS: 306-307); CAR MN-C2 CD28/OX40/CD3z (SEQ ID NOS: 614-615). Humanized MN-C3 CAR was generated: CAR MN-C3 4-1BB/CD3z (SEQ ID NOS: 600-601).

[0283] Several examples of humanized MN-E6 CARs with different hinge regions (SEQ ID NOS:345-360) were generated: CAR MN-E6-Fc/8/41BB/CD3z (SEQ ID NOS:310-311); CAR MN-E6 FcH/8/41BB/CD3z (SEQ ID NOS:315-316); CAR MN-E6 Fc/4/41BB/CD3z (SEQ ID NOS:318-319); CAR MN-E6 FcH/4/41BB/CD3z (SEQ ID NOS:321-322); CAR MN-E6 IgD/8/41BB/CD3z (SEQ ID NOS:323-324); CAR MN-E6 IgD/4/41BB/CD3z (SEQ ID NOS:327-328); CAR MN-E6 X4/8/41BB/CD3z (SEQ ID NOS:330-331); CAR MN-E6 X4/4/41BB/CD3z (SEQ ID NOS:333-334); CAR MN-E6 8+4/4/41BB/CD3z (SEQ ID NOS:336-337). In addition, several humanized MN-C3 single chain variable fragment and humanized MN-C8 single chain variable fragments were also generated.

[0284] Several CARs were also generated and tested wherein the targeting head of the CAR was derived from the anti-MUC1* antibody MNC2. CAR MN-C2-Fc/41BB/CD3z (SEQ ID NOS:732-733); CAR-MN-C2 IgD/Fc/4-1BB/CD3z (SEQ ID NOS:734-735); CAR MN-C2 FcH/41BB/CD3z (SEQ ID NOS:736-737); CAR-MN-C2 IgD/FcH/4-1BB/CD3z (SEQ ID NOS:738-739); CAR MN-C2 IgD/41BB/CD3z (SEQ ID NOS:740-741); CAR MN-C2 X4/41BB/CD3z (SEQ ID NOS:742-743).

[0285] The extracellular domain recognition unit of a MUC1* targeting CAR can comprise variable regions of any non-human, humanized or human antibody that is able to bind to at least 12 contiguous amino acids of the PSMGFR peptide (SEQ ID NO:2). In one aspect, the MUC1* targeting portion of the CAR comprises variable regions from non-human, humanized or human MN-E6, MN-C2, MN-C3 or MN-C8. In one aspect, the extracellular domain recognition unit of a CAR is comprised essentially of a humanized MN-E6, MN-C2, MN-C3 or MN-C8 single chain variable fragment scFv. The transmembrane region of the CAR can be derived from CD8 (SEQ ID NOS:363-364), or can be the transmembrane domain of CD3-zeta, CD28, 41bb, OX40 or other transmembrane region (SEQ ID NOS:361-372) and the cytoplasmic domain of a CAR with antibody fragment targeting MUC1* extracellular domain can be comprised of one or more selected from the group comprising an immune system co-stimulatory cytoplasmic domain. The group of immune system co-stimulatory domains includes but is not limited to CD3-zeta, CD27, CD28, 4-1BB, OX40, CD30, CD40, ICAm-1, LFA-1, ICOS, CD2, CD5, CD7 and Fc receptor gamma domain (SEQ ID NOS:373-382). Alternatively, the recognition unit portion of a CAR can comprise a peptide wherein the peptide binds to the target. NME7 binds to and activates MUC1*. In one aspect of the invention, the recognition unit of a CAR is a peptide derived from NME7 (SEQ ID NOS: 5-6) or a peptide derived from NME7, including but not limited to NME7 peptide A1 (SEQ ID NO: 7), NME7 peptide A2 (SEQ ID NO: 8), NME7 peptide B1 (SEQ ID NO: 9), NME7 peptide B2 (SEQ ID NO: 10) and NME7 peptide B3 (SEQ ID NO: 11).

[0286] Some strategies for generating CARs include a portion of the molecule that dimerizes with itself. In some cases, dimerization of the target is not desirable. Therefore, CARs can be constructed such that they heterodimerize. In one case the recognition unit of the first CAR binds to a first target while the recognition unit of the second CAR binds to a second target. Both recognition units can be antibody fragments, both can be peptides or one can be an antibody fragment and the other a peptide. A first target of the CAR can be the extracellular domain of MUC1*. The recognition unit of the CAR would be comprised of an antibody fragment that binds to MUC1* extracellular domain or to a PSMGFR peptide. Alternatively, the recognition unit of the CAR would be comprised of a peptide that binds to MUC1* extracellular domain, such peptides include peptides derived from an NME protein such as NME1 or NME7, more particularly NME7 derived peptides listed as SEQ ID NOS: 7-11. A second target of a heterodimeric CAR may be a peptide or antibody fragment that binds to NME7. Alternatively, a second target of a heterodimeric CAR may be a peptide or antibody fragment that binds to PD1 or its cognate ligand PDL-1 or other target ligand of the target cancer cell. A second target may be a peptide or antibody fragment that binds to NME1 or NME7-AB. Because it is desirable to prevent dimerization of MUC1 induced by a CAR, heterodimeric CARs can be constructed so that only the extracellular domain of one molecule has an extracellular recognition unit that binds to a target (SEQ ID NOS:584-587). The other molecule can have a truncated extracellular domain that is devoid of a target recognition unit or antibody fragment (SEQ ID NOS:588-599).

[0287] The CARs described can be transfected or transduced into a cell of the immune system. In a preferred embodiment, a MUC1* targeting CAR is transfected or transduced into a T cell. In one aspect, the T cell is a CD3+/CD28+ T cell. In another case it is a dendritic cell. In another case it is a B cell. In another case it is a mast cell. The recipient cell can be from a patient or from a donor. If from a donor, it can be engineered to remove molecules that would trigger rejection. Cells transfected or transduced with a CAR of the invention can be expanded ex vivo or in vitro then administered to a patient. Administrative routes are chosen from a group containing but not limited to bone marrow transplant, intravenous injection, in situ injection or transplant. In a preferred embodiment, the MUC1* targeting CAR is administered to a person diagnosed with or at risk of developing a MUC1-positive cancer.

[0288] There are many possible anti-MUC1* CAR constructs that can be transduced into T cells or other immune cells for the treatment or prevention of MUC1* positive cancers. CARs are made up of modules and the identity of some of the modules is relatively unimportant, while the identity of other modules is critically important.

[0289] Our experiments demonstrate that the antibody recognition fragment at the outermost portion of the CAR is critically important because it targets the immune cell bearing the CAR to the tumor site. The intracellular signaling motifs are also very important but can be interchanged. FIG. 28 shows a schematic of the components of CAR and the various sequences that may be included in a CAR. Referring to FIG. 28,

[0290] R1 is: nothing; or

[0291] a ligand or a fragment of a ligand of a cancer associated antigen; or

[0292] a ligand or a fragment of a ligand of MUC1 or MUC1*; or

[0293] an antibody or antibody fragment wherein the antibody or antibody fragment binds to MUC1 or MUC1*; or an antibody or antibody fragment wherein the antibody or antibody fragment binds to PSMGFR*, wherein the antibody may be human or humanized; or an antibody or antibody fragment of MN-E6, MN-C2, MN-C3 or MN-C8 or humanized MN-E6, MN-C2, MN-C3 or MN-C8; or a single chain variable fragment of an antibody, scFv, that binds to a cleaved MUC1 or MUC1*; or a scFv of MN-E6, MN-C2, MN-C3 or MN-C8, which may be humanized; or a peptide that binds to MUC1* or PSMGFR peptide; or is an antibody fragment, a scFv, or a peptide that binds the PSMGFR portion of MUC1*; or is comprised of sequence from the humanized variable region of MN-E6 (SEQ ID NOS: 38-39 and 93-94), MN-C2 (SEQ ID NOS: 144-145 and 194-195), MN-C3 (SEQ ID NOS: 439-440 and 486-487) and MN-C8 (SEQ ID NOS: 525-526 and 565-566). In one aspect, R1 is a scFv that binds the PSMGFR portion of MUC1* comprised of sequence from humanized MN-E6 scFv (SEQ ID NOS: 232-237), humanized MN-C2 scFv (SEQ ID NOS: 238-243), humanized MN-C3 scFv (SEQ ID NOS: 244-249) or humanized MN-C8 scFv (SEQ ID NOS: 250-255). In another aspect, R1 is a scFv that binds the PSMGFR portion of MUC1* comprised of sequence from humanized MN-E6 scFv (SEQ ID NOS: 232-237) or humanized MN-C2 scFv (SEQ ID NOS: 238-243). In one example R1 is a scFv that binds the PSMGFR portion of MUC1* comprised of sequence from humanized MN-E6 scFv (SEQ ID NOS: 232-237)

[0294] R2 is a polypeptide flexible linker that connects the recognition portion to the transmembrane domain of the CAR. In one aspect, R2 can be a polypeptide linker of different length from 5 to 250 amino acids. In another aspect, R2 is a polypeptide linker of human origin. In one aspect, R2 can be made of or a modification of the Fc region of a human immunoglobulin (IgG, IgA, IgE, IgM or IgD). I another aspect, R2 can be the hinge region or a modification of the hinge region of a human immunoglobulin (IgG, IgA, IgE, IgM or IgD). In one aspect, R2 can be the hinge region or a modification of the hinge region of a T-cell receptor (CD8a, CD28 or CD4). In one example, R2 is the hinge region of CD8a, the hinge region of human IgD or the Fc domain of human IgG1.

[0295] R3 is a transmembrane domain. In one aspect, R3 can be a transmembrane domain or a modification of a transmembrane domain of any transmembrane human proteins. In another aspect, R3 can be a transmembrane domain or a modification of a transmembrane domain from human cell receptor. In one aspect, R3 can be a transmembrane domain or a modification of a transmembrane domain of a T-cell receptor (CD8a, CD4, CD28, CD3z, OX40 or 41-BB). In another aspect, R3 is a transmembrane domain from the first cytoplasmic co-stimulatory domain of the CAR. In one aspect, R3 can be a transmembrane domain or a modification of a transmembrane domain of a T-cell receptor extended with 1, 2, 3, 4 or 5 amino acids of the cytoplasmic domain associated to the transmembrane domain. In another aspect, R3 can be a transmembrane domain or a modification of a transmembrane domain of a T-cell receptor extended with 1, 2, 3, 4 or five amino acids of the cytoplasmic domain associated to the transmembrane domain followed by a cystein for disulfide bond formation. In one example, R3 is the transmembrane domain of CD8a or CD4.

[0296] R4 is a signaling domain from a T-cell receptor. In one aspect, R4 can be the cytoplasmic signaling domain of CD3-zeta, CD27, CD28, 4-1BB, OX40, CD30, CD40, ICAm-1, LFA-1, ICOS, CD2, CD5, CD7 and Fc receptor gamma domain. In one example, R4 is the cytoplasmic domain of CD3-zeta. Several examples of humanized CAR with single signaling domain (CAR I) were regenerated: CAR MN-E6 CD3z (SEQ ID NOS: 294-295); CAR MN-C2 CD3z (SEQ ID NOS: 606-607)

[0297] R5 is a co-stimulatory domain from a T-cell receptor. In one aspect, R5 can be the cytoplasmic signaling domain of CD27, CD28, 4-1BB, OX40, CD30, CD40, ICAm-1, LFA-1, ICOS, CD2, CD5, CD7 and Fc receptor gamma domain. R5 will be different from R4 and R6. In one example, R5 is the cytoplasmic domain of CD28, 4-1BB or OX40. Several examples of humanized CAR with two signaling domain (CAR II) were regenerated: CAR MN-E6 CD28/CD3z (SEQ ID NOS: 297-298); CAR MN-E6 4-1BB/CD3z (SEQ ID NOS: 300-301); CAR MN-E6 OX40/CD3z (SEQ ID NOS: 616-617); CAR MN-C2 CD28/CD3z (SEQ ID NOS: 608-609); CAR MN-C2 4-1BB/CD3z (SEQ ID NOS: 610-611); CAR MN-C2 OX40/CD3z (SEQ ID NOS: 612-613); MN-C3 4-1BB/CD3z (SEQ ID NOS: 600-601); CAR MN-E6-Fc/8/41BB/CD3z (SEQ ID NOS:310-311); CAR MN-E6 FcH/8/41BB/CD3z (SEQ ID NOS:315-316); CAR MN-E6 Fc/4/41BB/CD3z (SEQ ID NOS:318-319); CAR MN-E6 FcH/4/41BB/CD3z (SEQ ID NOS:321-322); CAR MN-E6 IgD/8/41BB/CD3z (SEQ ID NOS:323-324); CAR MN-E6 IgD/4/41BB/CD3z (SEQ ID NOS:327-328); CAR MN-E6 X4/8/41BB/CD3z (SEQ ID NOS:330-331); CAR MN-E6 X4/4/41BB/CD3z (SEQ ID NOS:333-334); CAR MN-E6 8+4/4/41BB/CD3z (SEQ ID NOS:336-337).

[0298] R6 is a co-stimulatory domain from a T-cell receptor. In one aspect, R6 can be the cytoplasmic signaling domain of CD27, CD28, 4-1BB, OX40, CD30, CD40, ICAm-1, LFA-1, ICOS, CD2, CD5, CD7 and Fc receptor gamma domain. R6 will be different from R4 and R5. In one example, R5 is the cytoplasmic domain of CD28. Several examples of humanized CAR with two signaling domain (CAR III) were regenerated: CAR MN-E6 CD28/OX40/CD3z (SEQ ID NOS: 618-619); CAR MN-E6 CD28/4-1BB/CD3z (SEQ ID NOS: 303-304); CAR MN-C2 CD28/4-1BB/CD3z (SEQ ID NOS: 306-307); CAR MN-C2 CD28/OX40/CD3z (SEQ ID NOS: 614-615)

[0299] We and others have shown that intracellular signaling modules, such as CD3-zeta (SEQ ID NOS: 373-376), CD28 (SEQ ID NOS: 377-378) and 41BB (SEQ ID NOS: 379-380), alone or in combinations stimulate immune cell expansion, cytokine secretion and immune cell mediated killing of the targeted tumor cells (Pule M A, Straathof K C, Dotti G, Heslop H E, Rooney C M and Brenner M K (2005) A chimeric T cell antigen receptor that augments cytokine release and supports clonal expansion of primary human T cells. Mol Ther. 12(5):933-941; Hombach A A, Heiders J, Foppe M, Chmielewski M and Abken H. (2012) OX40 costimulation by a chimeric antigen receptor abrogates CD28 and IL-2 induced IL-10 secretion by redirected CD4(+) T cells. Oncoimmunology. 1(4):458-466; Kowolik C M, Topp M S, Gonzalez S, Pfeiffer T, Olivares S, Gonzalez N, Smith D D, Forman S J, Jensen M C and Cooper L J. (2006) CD28 costimulation provided through a CD19-specific chimeric antigen receptor enhances in vivo persistence and antitumor efficacy of adoptively transferred T cells. Cancer Res. 66(22):10995-11004; Loskog A, Giandomenico V, Rossig C, Pule M, Dotti G and Brenner M K. (2006) Addition of the CD28 signaling domain to chimeric T-cell receptors enhances chimeric T-cell resistance to T regulatory cells. Leukemia. 20(10):1819-1828; Milone M C, Fish J D, Carpenito C, Carroll R G, Binder G K, Teachey D, Samanta M, Lakhal M, Gloss B, Danet-Desnoyers G, Campana D, Riley J L, Grupp S A and June C H. (2009) Chimeric receptors containing CD137 signal transduction domains mediate enhanced survival of T cells and increased antileukemic efficacy in vivo. Mol Ther. 17(8):1453-1464; Song D G, Ye Q, Carpenito C, Poussin M, Wang L P, Ji C, Figini M, June C H, Coukos G, Powell D J Jr. (2011) In vivo persistence, tumor localization, and antitumor activity of CAR-engineered T cells is enhanced by costimulatory signaling through CD137 (4-1BB). Cancer Res. 71(13):4617-4627). Less important is the identity of the short extracellular piece that presents the antibody fragment, the transmembrane domain, and the short cytoplasmic tail that comes before the intracellular signaling motifs.

[0300] The identity of the recognition antibody fragment that targets the CAR to a tumor is critically important. For the treatment of MUC1 positive or MUC1* positive cancers, that antibody recognition fragment must bind to the extracellular domain of portion of MUC1 that remains after cleavage and shedding of the bulk of the extracellular domain, which contains the tandem repeat domains. In one aspect of the invention, the portion that remains comprises the PSMGFR sequence. In another aspect of the invention, the portion of MUC1 that remains after cleavage and shedding contains the PSMGFR sequence plus up to nine (9) more amino acids extended at the N-terminus. In another aspect of the invention, the portion of MUC1 that remains after cleavage and shedding contains the PSMGFR sequence plus up to twenty one (21) more amino acids extended at the N-terminus. In one aspect, the antibody recognition fragment binds to at least twelve contiguous amino acids of a PSMGFR peptide. In another aspect of the invention, the antibody recognition fragment binds to a peptide comprising the sequence SNIKFRPGSVVVQLTLAFREGTINVHDVETQFNQYKTEAASRY (SEQ ID NO:620); or SVVVQLTLAFREGTINVHDVETQFNQYKTEAASRY (SEQ ID NO:621).

[0301] As a demonstration, a single chain antibody fragment that included the variable domain of the monoclonal anti-MUC1* antibodies called MN-E6 or MN-C2 were engineered into a panel of CARs (Table 1). The MUC1* targeting CARs were then transduced, separately or in combinations, into immune cells. When challenged with surfaces presenting a MUC1* peptide, an antigen presenting cell transfected with MUC1*, or MUC1* positive cancer cells, the immune cells that were transduced with MUC1* targeting CARs elicited immune responses, including cytokine release, killing of the targeted cells and expansion of the immune cells (Table 2).

[0302] In one case, human Jurkhat cells were transduced with MUC1*-targeting CARs and upon exposure to a surface presenting the PSMGFR peptide, K562 antigen presenting cells that had been transfected with MUC1* or MUC1* positive cancer cells, the Jurkhat cells secreted IL-2. In another case, purified human T cells were transduced with MUC1*-targeting CARs and upon exposure to a surface presenting the PSMGFR peptide, K562 antigen presenting cells that had been transfected with MUC1* or MUC1* positive cancer cells, the T cells secreted IL-2, interferon gamma, and killed the targeted antigen presenting cells and cancer cells, while the T cells expanded. As demonstrated, CARs that comprise an antibody fragment, wherein the antibody fragment is able to bind to the PSMGFR peptide, a transmembrane domain and a cytoplasmic tail bearing co-stimulatory domains, elicit an immune system anti-tumor cell response when said CARs are transduced into immune cells, which include T cells. Therefore, other antibodies, antibody fragments or antibody mimics that are able to bind to the PSMGFR peptide will perform similarly and can be used to treat or prevent cancers. Those skilled in the art will recognize that there are a number of technologies available for transfecting or transducing cells with CARs and the invention is not limited by the method used for making the immune cell express a MUC1*-targeting CAR.

[0303] For example, the gene encoding the CARs and activated T cell induced genes described herein can be virally transduced into an immune cell using viruses, which may or may not result in the CAR gene being integrated into the genome of the recipient cell. Virus delivery systems and viral vectors including but not limited to retroviruses, including gamma-retroviruses, lentivirus, adenoviruses, adeno-associated viruses, baculoviruses, poxvirus, herpes simplex viruses, oncolytic viruses, HF10, T-Vec and the like can be used. In addition to viral transduction, CARs and activated T cell induced genes described herein can be directly spliced into the genome of the recipient cell using methods such as CRISPR technology, CRISPR-Cas9 and -CPF1, TALEN, Sleeping Beauty transposon system, and SB 100×.

[0304] Similarly, the identity of molecules that make up the non-targeting portions of the CAR such as the extracellular domain, transmembrane domain and membrane proximal portion of the cytoplasmic domain, are not essential to the function of a MUC1*-targeting CAR. For example, the extracellular domain, transmembrane domain and membrane proximal portion of the cytoplasmic domain can be comprised of portions of CD8, CD4, CD28, or generic antibody domains such as Fc, CH2CH3, or CH3. Further, the non-targeting portions of a CAR can be a composite of portions of one or more of these molecules or other family members.

[0305] One aspect of the invention is a method for treating a patient diagnosed with, suspected of having, or at risk of developing a MUC1 positive or MUC1* positive cancer, wherein the patient is administered an effective amount of immune cells that have been transduced with a MUC1* targeting CAR. In another aspect of the invention, the immune cells are T cells isolated from a patient, which are then transduced with CARs wherein the targeting head of the CAR binds to MUC1*, and after expansion of transduced T cells, the CAR T cells are administered in an effective amount to the patient. In yet another aspect of the invention, the immune cells are T cells isolated from a patient, which are then transduced with CARs wherein the targeting head of the CAR comprises portions of huMN-E6, huMN-C2, huMN-C3 or huMN-C8, and after optional expansion of transduced T cells, the CAR T cells are administered in an effective amount to the patient. In yet another aspect of the invention, the CAR that is transduced into the immune cell and administered to the patient diagnosed with a MUC1 or MUC1* positive cancer is chosen from the list of CARs in Table 1 or Table 2.

[0306] Specifics of CARs Made and Tested

[0307] Many MUC1* targeting CARs were generated wherein the targeting antibody fragment at the distal end of the CAR was either MN-E6, MN-C2, MN-C3 or MN-C8. The DNA of each CAR was sequenced to verify that cloning was correctly done. Each construct was then shuffled into an expression plasmid, transfected into cells and then verified that the construct had successfully inserted by Western blot. Surface expression was verified by FACS. The MUC1* targeting CARs were then virally transduced into immune cells. In one aspect, they were transduced into Jurkat cells. In another aspect, they were transduced into primary human T cells that were purified from blood. A series of functional assays were performed and verified that the CARs were functional. Functional assays showed that both Jurkat cells and primary T cells transduced with MUC1* targeting CAR secreted the cytokine IL-2 and interferon gamma (IFN-g) when challenged with cells or surfaces presenting MUC1*. Table 1 lists the CARs that were made and tested. Table 2 lists cytokine release data for some of the CARs after transduction into human T cells and co-culture with a variety of cancer cells. FIG. 29 is a graph of an experiment measuring IL-2 cytokine secretion by Jurkat cells that were transduced with a panel of CARs, including MN-E6 CD8/CD3z, MN-E6 CD8/CD28/CD3z, MN-E6 CD8/41BB/CD3z, MN-E6 CD4/CD28/CD3z and MN-E6 CD4/CD28/41BB/CD3z. IL-2 was secreted only when the CAR Jurkat cells were exposed to K562-wt cells or K562 cells that had been transfected with MUC1*. It should be noted that the parent K562-wt cells express very low levels of MUC1*. Another group of CARs transfected into Jurkat cells was similarly tested for cytokine secretion. FIG. 30 shows IL-2 secretion by Jurkat T cells that were transduced with MN-E6 CD8/CD28/CD3z, MN-E6 CD8/41BB/CD3z, MN-E6 CD4/CD28/CD3z or MN-E6 CD4/41BB/CD3z, when the CAR T cells were exposed to K562-wt cells or K562 cells that had been transfected with MUC1*. Similarly, FIG. 31 shows IL-2 cytokine secretion by primary human T cells that were transduced with MN-E6 CD8/CD28/CD3z, MN-E6 CD8/41BB/CD3z or MN-E6 CD4/41BB/CD3z. Cytokine secretion only occurred when the MUC1* targeting CAR T cells were exposed to K562-wt cells or K562 cells that had been transfected with MUC1*. Another cytokine that is secreted by activated T cells when they see a target cell is interferon-gamma (IFN-g). FIG. 32 shows that interferon-gamma was secreted by primary human T cells that were transduced with a panel of CARs, including MN-E6 CD8/CD28/CD3z and MN-E6 CD4/41BB/CD3z, when the CAR T cells were exposed to K562-wt cells or K562 cells that had been transfected with MUC1*. Interferon-gamma was similarly secreted by primary human T cells that were transduced with a panel of CARs, including MN-E6 CD8/CD28/CD3z, MN-E6 CD8/41BB/CD3z and MN-E6 CD8/CD28/41BB/CD3z, when the MUC1* targeting CAR T cells were exposed to K562-wt cells, K562 cells that had been transfected with MUC1*, or MUC1* positive cancer cells of prostate cancer (DU145), breast cancer (1500) or pancreatic cancer (Capan) (FIG. 33).

[0308] Another measure of function of CAR T cells is whether or not they induce killing of the targeted cells. T cells transfected with a variety of CARs comprising antibody fragments that bind to the PSMGFR sequence of MUC1* killed MUC1* expressing cells in co-culture assays. In one assay, target MUC1* expressing cells are incubated with calcein. When they are mixed with CAR T cells wherein the CAR comprises an antibody fragment such as MN-E6, MN-C2, MN-C3 or MN-C8 the CAR T cells kill the MUC1* presenting cells which causes the target cells to lyse and releases calcein into the supernatant. FIG. 34 is a graph of an experiment measuring target cell death when primary human T cells, isolated from a blood sample, that were transduced with a panel of CARs, including MN-E6 CD8/CD28/CD3z, MN-E6 CD8/41BB/CD3z and MN-E6 CD4/41BB/CD3z, when the CAR T cells were exposed to K562-wt cells or K562 cells that had been transfected with MUC1*. The ratio of T cells to target cells was 1:1 and the cells were co-cultured for 24 hours. FIGS. 35A-35B are graphs of FACS measuring a time course of target cell survival from Day 1 to Day 3. Primary human T cells, isolated from a blood sample, were transduced with a panel of CARs, including humanized MN-E6-CD8-3z, MN-E6-CD8-CD28-3z, MN-E6-CD8-41BB-3z and MN-E6-CD8-CD28-41BB-3z. The CAR T cells were then exposed to K562-wt cells that naturally express low levels of MUC1*, or K562 cells that had been transfected with MUC1* high. The ratio of MUC1* targeting CAR T cells to target cells was either 1:1, 10:1, or 20:1. Surviving cells were detected and measured at Day 1 or Day 3.

[0309] FIG. 36 is a graph of FACS measurements of target cell survival at Day 3 of co-culture experiment. Primary human T cells were transduced with a panel of CARs, including humanized MN-E6-CD8-3z, MN-E6-CD8-CD28-3z, MN-E6-CD8-41BB-3z and MN-E6-CD8-CD28-41BB-3z. The CAR T cells were then exposed to MUC1* positive T47D breast cancer cells or MUC1* positive 1500 aka ZR-75-1 breast cancer cells. The ratio of MUC1* targeting CAR T cells to target cells was either 1:1 or 10:1. As can be seen from the graph, T cells transduced with a MUC1* targeting CAR have a much greater killing effect on MUC1* cancer cells than the untransduced control T cells. In addition, the killing effect is much greater when the ratio of T cells:target cells is increased. FIG. 37 is a graph of FACS measurements of target cell survival at Day 1 of co-culture experiment. Primary human T cells were transduced with a panel of CARs, including humanized MN-E6-CD8-41BB-3z, MN-E6-CD4-41BB-3z, and MN-E6-CD8-CD28-41BB-3z. The CAR T cells were then exposed to the following MUC1* positive cancer cells: T47D breast cancer; capan2 pancreatic cancer; or DU-145 prostate cancer. The ratio of MUC1* targeting CAR T cells to target cells was 5:1. As can be seen from the graph, T cells transduced with a MUC1* targeting CAR have a much greater killing effect on MUC1* cancer cells than the untransduced control T cells. Note that the measurements were taken after 24 hours with only a 5:1 T cell to target cell ratio. Also note that MUC1* targeting CARs that have a CD4 extracellular domain-transmembrane-cytoplasmic tail work equally well as CD8 constructs.

[0310] FIG. 38 is a graph of FACS measurements of target cell survival at Day 3 of co-culture experiment. Primary human T cells were transduced with a panel of CARs, including humanized MN-E6-CD8-41BB-3z, MN-E6-CD4-41BB-3z, and MN-E6-CD8-CD28-41BB-3z. The CAR T cells were then exposed to the following MUC1* positive cancer cells: K562 leukemia cells transfected with MUC1*; T47D breast cancer; 1500 aka ZR-75-1 breast cancer cells; or CAPAN-2 pancreatic cancer cells. In addition to the untransduced T cell controls, the assay was performed on PC3 MUC1* negative prostate cancer cells. The ratio of MUC1* targeting CAR T cells to target cells was 1:1. As can be seen from the graph, T cells transduced with a MUC1* targeting CAR have a much greater killing effect on MUC1* cancer cells than the untransduced control T cells. In addition, the killing effect is specific for MUC1* positive cells. Note that MUC1* targeting CARs that have a CD4 extracellular domain-transmembrane-cytoplasmic tail work equally well as CD8 constructs. FIG. 39 is a graph of FACS measurements of CAR T cell expansion over 24 hours in co-culture with target cells at a ratio of 5:1 CAR T cells to target cells. The primary human T cells were transduced with a panel of CARs, including humanized MN-E6-CD8-41BB-3z, MN-E6-CD4-41BB-3z, and MN-E6-CD8-CD28-41BB-3z. The CAR T cells were co-cultured with MUC1* positive T47D breast cancer cells, MUC1* positive Capan pancreatic cancer cells, and MUC1-negative cells HCT-116 colon cancer cells and HEK-293 human embryonic kidney cells. As can be seen from the graph, the CAR T population is increased in the presence of MUC1* positive cells. FIG. 40 shows a photograph of a Western blot of MUC1* targeting CARs. From 1 to 9 are: 1. MN-E6scFv-Fc-8-41BB-CD3z (Human Fc as hinge region with CD8 TM); 2: MN-E6scFv-FcH-8-41BB-CD3z (Human Fc hingeless as hinge region with CD8 TM); 3: MN-E6scFv-Fc-4-41BB-CD3z (Human Fc as hinge region with CD4 TM); 4: MN-E6scFv-FcH-4-41BB-CD3z (Human Fc as hingeless hinge region with CD4 TM); 5: MN-E6scFv-IgD-8-41BB-CD3z (hinge region from human IgD with CD8 TM); 6: MN-E6scFv-IgD-4-41BB-CD3z (hinge region from human IgD with CD4 TM); 7: MN-E6scFv-X4-8-41BB-CD3z (Long flexible linker as hinge region with CD8 TM); 8: MN-E6scFv-X4-4-41BB-CD3z (Long flexible linker as hinge region with CD4 TM); 9: MN-E6scFv-8-4-41BB-CD3z (Hinge region from CD8 and CD4 a with CD4 TM).

[0311] FIG. 41 shows graphs of FACS scans of T47D breast cancer cells co-cultured with human T cells that were transduced with MN-E6scFv-Fc-8-41BB-CD3z, MN-E6scFv-FcH-8-41BB-CD3z (hingeless), MN-E6scFv-Fc-4-41BB-CD3z, MN-E6scFv-IgD-8-41BB-CD3z, MN-E6scFv-X4-8-41BB-CD3z and MN-E6scFv-X4-4-41BB-CD3z. T cells and cancer cells were co-cultured at a 1:1 ratio for 48 hours. T cell counts were normalized to an average of all untransduced T cells and target cells were normalized to each specific cell type when co-cultured with untransduced T cells. The graph shows that when the CAR T cells are co-cultured with MUC1* positive cancer cells, the T cell population expands and the targeted cancer cell population decreases.

[0312] FIG. 42 shows graphs of FACS scans of T47D breast cancer cells, Capan-2 pancreatic cancer cells, K562-MUC1* transfected cells, and K562-wt cells that were co-cultured with human T cells that were transduced with MN-E6scFv-Fc-8-41BB-CD3z, MN-E6scFv-FcH-8-41BB-CD3z, MN-E6scFv-Fc-4-41 BB-CD3z, MN-E6scFv-IgD-8-41BB-CD3z, MN-E6scFv-X4-8-41BB-CD3z and MN-E6scFv-X4-4-41BB-CD3z. T cells and cancer cells were co-cultured at a 1:1 ratio for 48 hours. T cell counts were normalized to an average of all untransduced T cells and target cells were normalized to each specific cell type when co-cultured with untransduced T cells. The graph shows that when the CAR T cells are co-cultured with MUC1* positive cancer cells, the T cell population expands and the targeted cancer cell population decreases.

[0313] Specificity of Anti-MUC1* Targeting Antibodies

[0314] As these experiments demonstrate, the critical portion of a CAR is the antibody fragment that directs the immune cell to the tumor cell. As we will show in the following section, MN-E6 and MN-C2 are specific for the form of MUC1* that is expressed on tumor cells. The next most important part of a CAR is the cytoplasmic tail bearing immune system co-stimulatory domains. The identity of these domains modulates the degree of immune response but does not affect the specificity. As shown, the identity of the transmembrane portion of a CAR is the least important. It appears that as long as the transmembrane portion has some flexibility and is long enough to allow the antibody fragment to reach its cognate receptor on the tumor cell, it will suffice. This is demonstrated in FIGS. 40-42. CARs comprising the MN-E6 targeting antibody fragment, and intracellular co-stimulatory domains 41BB and CD3-zeta but having a variety of different extracellular, transmembrane and short cytoplasmic tail all worked in that they specifically killed the targeted cells while stimulating the expansion of the host T cells.

[0315] The most accurate way of demonstrating antibody specificity is testing the antibody on normal human tissue specimens compared to cancerous tissue specimens. MN-C2 and MN-E6 were shown to specifically bind to MUC1 or MUC1* positive cancer cells. Several breast tumor arrays were assayed using several anti-MUC1 or MUC1* antibodies. Essentially the studies involving serial sections of breast cancer tissue specimens from over 1,200 different breast cancer patients showed that very little full-length MUC1 remains on breast cancer tissues. The vast majority of the MUC1 expressed is MUC1* and is stained by MN-C2. The analysis was performed by Clarient Diagnostics and tissue staining was scored using the Allred method. For example, FIG. 43 shows serial sections of breast cancer tissue arrays that were stained with either VU4H5, a commercially available anti-MUC1 antibody that binds to the tandem repeats, or MN-C2 that binds to MUC1*. FIGS. 43 and 44 are photographs of breast cancer tissue arrays stained with either VU4H5 which recognizes MUC1-FL (full length) or MN-C2 which recognizes cancerous MUC1*. Tissue staining was scored using Allred scoring method which combines an intensity score and a distribution score. Below the photographs of the tissue arrays are color-coded graphs displaying the results. As can be seen, the arrays stained with VU4H5 are very light and many tissues do not stain at all despite the published reports that MUC1 is aberrantly expressed on over 96% of all breast cancers as evidenced by nucleic acid based diagnostics. In contrast, the arrays stained with MN-C2 are very dark (red versus yellow or white in graph). Additionally, many tissues did not stain at all with anti-full-length MUC1 but stained very dark with MN-C2, (see green boxes in graph). Similarly, we stained normal or cancerous breast tissues with humanized MN-E6 scFv-Fc. The antibody fragment was biotinylated so it could be visualized by a secondary streptavidin based secondary. As can be seen in FIG. 45, hMN-E6 scFv-Fc does not stain normal breast tissue but stains cancerous breast tissue. Further, the intensity and homogeneity of staining increases with tumor grade and/or metastatic grade of the patient (FIGS. 45-46). Similarly, hMN-E6 scFv-Fc did not stain normal lung tissue but did stain lung cancer tissue (FIGS. 47-51) and the intensity and distribution of staining increased as tumor grade or metastatic grade increased. FIG. 52 shows photographs of normal small intestine and cancerous small intestine tissues stained with humanized MN-E6-scFv-Fc biotinylated anti-MUC1* antibody at 5 ug/mL, then stained with a secondary streptavidin HRP antibody. A) is a normal small intestine tissue. B) is small intestine cancer from patient as denoted in the figure. C,D are photographs of the corresponding serial sections that were stained with the secondary antibody alone. FIG. 53 shows photographs of normal small intestine tissues stained with humanized MN-E6-scFv-Fc anti-MUC1* antibody at 50 ug/mL, then stained with a secondary goat-anti-human HRP antibody. A-D are normal small intestine tissue. E-H are photographs of the corresponding serial sections that were stained with the secondary antibody alone. FIG. 54 shows photographs of cancerous small intestine tissues stained with humanized MN-E6-scFv-Fc anti-MUC1* antibody at 50 ug/mL, then stained with a secondary goat-anti-human HRP antibody. A-D are cancerous small intestine tissue from a patient as denoted in figure. E-H are photographs of the corresponding serial sections that were stained with the secondary antibody alone. FIG. 55 shows photographs of cancerous small intestine tissues stained with humanized MN-E6-scFv-Fc anti-MUC1* antibody at 50 ug/mL, then stained with a secondary goat-anti-human HRP antibody. A-D are cancerous small intestine tissue from a patient as denoted in figure. E-H are photographs of the corresponding serial sections that were stained with the secondary antibody alone. FIG. 56 shows photographs of normal colon tissues stained with humanized MN-E6-scFv-Fc anti-MUC1* antibody at 50 ug/mL, then stained with a secondary goat-anti-human HRP antibody. A-D are normal colon. E-H are photographs of the corresponding serial sections that were stained with the secondary antibody alone. FIG. 57 shows photographs of colon cancer tissues stained with humanized MN-E6-scFv-Fc anti-MUC1* antibody at 50 ug/mL, then stained with a secondary goat-anti-human HRP antibody. A-D are colon cancer tissue from a metastatic patient as denoted in figure. E-H are photographs of the corresponding serial sections that were stained with the secondary antibody alone. FIG. 58 shows photographs of colon cancer tissues stained with humanized MN-E6-scFv-Fc anti-MUC1* antibody at 50 ug/mL, then stained with a secondary goat-anti-human HRP antibody. A-D are colon cancer tissue from a Grade 2 patient as denoted in figure. E-H are photographs of the corresponding serial sections that were stained with the secondary antibody alone. FIG. 59 shows photographs of colon cancer tissues stained with humanized MN-E6-scFv-Fc anti-MUC1* antibody at 50 ug/mL, then stained with a secondary goat-anti-human HRP antibody. A-D are colon cancer tissue from a metastatic patient as denoted in figure. E-H are photographs of the corresponding serial sections that were stained with the secondary antibody alone. FIG. 60 shows photographs of prostate cancer tissues stained with humanized MN-E6-scFv-Fc anti-MUC1* antibody at 50 ug/mL, then stained with a secondary goat-anti-human HRP antibody. A-D are prostate cancer tissue from a patient as denoted in figure. E-H are photographs of the corresponding serial sections that were stained with the secondary antibody alone. FIG. 61 shows photographs of prostate cancer tissues stained with humanized MN-E6-scFv-Fc anti-MUC1* antibody at 50 ug/mL, then stained with a secondary goat-anti-human HRP antibody. A-D are prostate cancer tissue from a patient as denoted in figure. E-H are photographs of the corresponding serial sections that were stained with the secondary antibody alone. FIG. 62 shows photographs of prostate cancer tissues stained with humanized MN-E6-scFv-Fc anti-MUC1* antibody at 50 ug/mL, then stained with a secondary goat-anti-human HRP antibody. A-D are prostate cancer tissue from a patient as denoted in figure. E-H are photographs of the corresponding serial sections that were stained with the secondary antibody alone.

[0316] One aspect of the invention is a method for treating a patient diagnosed with, suspected of having, or at risk of developing a MUC1 positive or MUC1* positive cancer, wherein a specimen is obtained from the patient's cancer and is tested for reactivity with an antibody that binds to PSMGFR SEQ ID NO:2, SNIKFRPGSVVVQLTLAFREGTINVHDVETQFNQYKTEAASRY (SEQ ID NO:620) or SVVVQLTLAFREGTINVHDVETQFNQYKTEAASRY (SEQ ID NO:621). The patient is then treated with an scFv, scFv-Fc or CAR T that comprises antibody variable fragments from the antibody that reacted with their cancer specimen. Another aspect of the invention is a method for treating a patient diagnosed with, suspected of having, or at risk of developing a MUC1 positive or MUC1* positive cancer, wherein a specimen is obtained from the patient's cancer and is tested for reactivity with MN-E6-scFv, MN-C2-scFv, MN-C3-scFv or MN-C8-scFv; the patient is then treated with the scFv, scFv-Fc-mut or CAR T that comprises portions of the antibody that reacted with their cancer specimen.

[0317] We discovered that MUC1 can be cleaved to MUC1* by more than one cleavage enzyme and that the site of cleavage affects its fold and consequently affects which monoclonal antibody is able to recognize that form of MUC1*. Different cancer cells or cancerous tissues express different cleavage enzymes. We tested various cleavage enzyme inhibitors on different cancer cell lines and found that an inhibitor that inhibits cleavage of MUC1 in one cancer cell line did not inhibit its cleavage in another cancer cell line. Similarly, PCR experiments showed that cleavage enzymes are expressed at different levels in different cells or cell lines. For example, hematopoietic stem cells of the bone marrow express a MUC1* that is recognized by monoclonal antibody MNC3 but not MNE6 or MNC2 (FIG. 63). The growth of DU145 prostate cancer cells and T47D breast cancer cells is inhibited by the Fabs of MNC2 and MNE6 but not by the Fabs of MNC3 or MNC8, indicating that the cancer cell lines express a MUC1* that is recognized by MNE6 and MNC2 but not by MNC3 or MNC8 (FIG. 64). PCR experiments show that CD34 positive cells of the bone marrow express about 2,500-times more MMP2 and about 350-times more ADAM28 than T47D breast cancer cells, while DU145 prostate cancer cells express about 2,000-times more ADAM TS16, about 400-times more MMP14 and about 100-times more MMP1 than T47D breast cancer cells (FIG. 65 and FIG. 66). Conversely, T47D breast cancer cells express about 80-times more MMP9 than the bone marrow cells and about twice as much as DU145 prostate cancer cells. Various cleavage enzyme inhibitors were tested for their ability to inhibit cleavage in different kinds of cancer cells. TAPI-1 that inhibits MMP2, MMP9, and ADAM17 and MMP2/9 V inhibitor that inhibits MMP2, MMP9, MMP14, inhibited the cleavage of MUC1 in T47D breast cancer cells (FIGS. 67A, 67B), but none of the cleavage enzyme inhibitors tested had an effect in DU145 prostate cancer cells (FIGS. 68A, 68B). These experiments indicated that MUC1 in these breast cancer cells was being cleaved by MMP2, MMP9, MMP14 or ADAM17 or combinations of these enzymes.

[0318] BiTEs

[0319] Divalent (or bivalent) single-chain variable fragments (di-scFvs, bi-scFvs) can be engineered by linking two scFvs. This can be done by producing a single peptide chain with two V_{H} and two V_{L} regions, yielding tandem scFvs. Another possibility is the creation of scFvs with linker peptides that are too short for the two variable regions to fold together (about five amino acids), forcing scFvs to dimerize. This type is known as diabodies. Diabodies have been shown to have dissociation constants up to 40-fold lower than corresponding scFvs, meaning that they have a much higher affinity to their target. Consequently, diabody drugs could be dosed much lower than other therapeutic antibodies and are capable of highly specific targeting of tumors in vivo. Still shorter linkers (one or two amino acids) lead to the formation of trimers, so-called triabodies or tribodies. Tetrabodies have also been produced. They exhibit an even higher affinity to their targets than diabodies.

[0320] All of these formats can be composed from variable fragments with specificity for two different antigens, in which case they are types of bispecific antibodies. The furthest developed of these are bispecific tandem di-scFvs, known as bi-specific T-cell engagers (BiTE antibody constructs). BiTEs are fusion proteins consisting of two scFvs of different antibodies, on a single peptide chain of about 55 kilodaltons. One of the scFvs may bind to T cells such as via the CD3 receptor, and the other to a tumor cell via a tumor specific molecule, such aberrantly expressed MUC1*.

[0321] Another aspect of the invention is a method for treating a patient diagnosed with, suspected of having, or at risk of developing a MUC1 positive or MUC1* positive cancer, wherein the patient is administered an effective amount of a BiTE wherein one antibody variable fragment of the BiTE binds to a T cell surface antigen and the other antibody variable fragment of the BiTE binds to PSMGFR SEQ ID NO:2, SNIKFRPGSVVVQLTLAFREGTINVHDVETQFNQYKTEAASRY (SEQ ID NO:620) or SVVVQLTLAFREGTINVHDVETQFNQYKTEAASRY (SEQ ID NO:621). In one case, the antibody variable fragment of the BiTE that binds to MUC1* comprises portions of huMN-E6, huMN-C2, huMN-C3, or huMN-C8.

[0322] In another aspect of the invention, MUC1* peptides including PSMGFR SEQ ID NO:2, most or all of SNIKFRPGSVVVQLTLAFREGTINVHDVETQFNQYKTEAASRY (SEQ ID NO:620) or SVVVQLTLAFREGTINVHDVETQFNQYKTEAASRY (SEQ ID NO:621) are used in adoptive T cell approaches. In this case, a patient's T cells are exposed to the MUC1* peptides and through various rounds of maturation, the T cells develop MUC1* specific receptors. The adapted T cells are then expanded and administered to the donor patient who is diagnosed with, suspected of having, or is at risk of developing a MUC1* positive cancer.

[0323] A series of CARs were also made that had MNC2 and humanized MNC2 as the extra cellular, targeting head of the CAR. The constructs for these CARs were inserted into a plasmid that was then inserted into a Lenti viral vector. Human T cells were then transduced with the lenti viral vector carrying the MNC2 CARs and huMNC2 CARs. MNC2-scFv-CARs that were mouse sequence or humanized were generated. CARs comprising MNC2-scFv and a variety of transmembrane and intracellular co-stimulatory domains were generated including constructs listed in Table 1. In one aspect of the invention, the CAR comprised huMNC2-scFv-short hinge region-transmembrane domain derived from CD8-short intracellular piece-4-1BB-3zeta. In another aspect, the transmembrane domain was derived from CD4 transmembrane sequence. In another aspect, the intracellular co-stimulatory domain was CD28-3zeta. In yet another aspect, the intracellular co-stimulatory domain was CD28-4-1BB-3zeta.

[0324] There are a variety of methods for assessing whether or not T cells recognize a target cell and are in the process of mounting an immune response. T cells cluster when they recognize a target or foreign cell. This can be readily seen with the naked eye or at low magnification. The appearance of CAR T cell clustering when co-cultured with target cancer cells is one measure of: a) whether or not they recognize the cells as target cells; and b) whether or not they are getting activated to attack the targeted cells, which in this case are cancer cells. FIGS. 80A-80F show photographs of MUC1* positive T47D breast cancer cells that were stably transfected with mCherry, so are red, which were co-cultured with either human T cells without a CAR or human T cells transduced with huMNC2-scFv-CAR44, huMNC2-scFv-CAR49, huMNC2-scFv-CAR50, huMNC2-scFv-CAR18 or huMNC2-scFv-CAR19. In this case, the CAR constructs carry a GFP marker so the CAR transduced T cells are green. As can be seen, there is no T cell induced clustering of the cancer cells when the T cell does not carry a CAR. However, when T cells carrying a MUC1* targeting CAR, there is dramatic clustering of the MUC1* positive cancer cells.

[0325] After T cells recognize and cluster target cells, they overexpress perforin and granzyme B. Together these two molecules activate a cell death pathway in the targeted cell. It is thought that the perforin makes a hole in the target cell into which the T cell injects granzyme B which then activates apoptotic proteases, causing the target cell to lyse. FIGS. 81A-81D show huMNC2-scFV-CAR44 T cells binding to target MUC1* positive prostate cancer cells and injecting granzyme B.

[0326] Another measure of whether or not a T cell has recognized a target cell and is activated to kill that cell, is the upregulation of cytokines, especially interferon gamma (IFN-g). Table 2 lists the results of ELISA experiments measuring the amount of interferon gamma secreted by a variety of MUC1* targeting CAR T cells after co-culture with a variety of different cancer cells. To establish the link between MUC1* expression and CAR T activity, we performed an experiment to determine if the amount of CAR T killing was proportional to the amount of MUC1* expressed by the cancer cell. T47D is a highly MUC1* positive breast cancer cell. These cells also express some full-length MUC1. T47D cells were transfected with varying amounts of additional MUC1* then co-cultured with CAR T cells. The results showed that at low effector (CAR T) to target (cancer cells) ratios such as 1:1, specific CAR T killing increased with increasing MUC1* expression and the amount of secreted interferon gamma also increased with increasing MUC1* (FIG. 82B). Another method for measuring CAR T response is by fluorescence activated cell sorting (FACS). FIG. X7A shows a graph of FACS analysis of the T47D cancer cells transfected with additional MUC1*. At a 1:1 E:T ratio, CAR T mediated cancer cell killing increased as the amount of MUC1* expressed on the cancer cells increased. This is important because we previously showed that as cancer cells acquire resistance to chemotherapy agents, they increase the amount of MUC1* that they express (Fessler et al 2009). Therefore an anti-MUC1* CAR T would be especially beneficial as a treatment for cancer patients with late stage cancers or those that have acquired resistance to chemotherapy agents. Several MNC2-scFv-CARs were transduced into human T cells and analyzed by FACS to determine their ability to kill targeted MUC1* positive cancer cells. FIGS. 83A-83D show the results of FACS analysis of huMNC2-CAR44 T cells after 24 hours of co-culture with MUC1* positive cancer cells. FIG. 83A is a graph of FACS data showing the percentage of T47D cancer cells that were killed by huMNC2-CAR44 T cells (blue bars), compared to untransduced T cells (red bars). The X-axis shows the ratio of T cells to cancer cells. FIG. 83B is a graph of FACS data showing the percentage of K562-MUC1* cancer cells that were killed by huMNC2-CAR44 T cells (blue bars), compared to untransduced T cells (red bars). FIG. 83C shows the FACS scans wherein the T47D breast cancer cells were stained with the dye CMTMR. Sytox blue is a dead cell stain. Dead cancer cells are those in quadrants 2 and 3. FIG. 83D shows the FACS scans wherein the K562-MUC1* cancer cells were stained with the dye CMTMR. Sytox blue is a dead cell stain. Dead cancer cells are those in quadrants 2 and 3.

[0327] In addition to FACS analysis, many researchers now use an xCELLigence instrument to measure CAR T killing of cancer cells. FACS is not the best method for tracking T cell induced cell killing because the T cells lyse the target cell. By FACS it is difficult to measure dead cells because they are excluded as cell debris, so one must infer an amount of cell killing and by various methods determine if the missing cells are T cells or cancer cells.

[0328] The xCELLigence instrument uses electrode arrays upon which cancer cells are plated. The adherent cancer cells insulate the electrode and so cause an increase in impedance as they grow. Conversely, T cells are not adherent and remain in suspension so do not contribute to insulation of the electrode which would increase impedance. However, if the T cells or CAR T cells kill the cancer cells on the electrode plate, the cancer cells ball up and float off as they die, which causes the impedance to decrease. The xCELLigence instrument measures impedance as a function of time, which is correlated to cancer cell killing. In addition, the electrode plates also have a viewing window. When CAR T cells effectively kill the adsorbed target cancer cells, there is a decrease in impedance but also one can see that there are no cancer cells left on the plate surface.

[0329] FIGS. 84A-84H show the cytotoxic effect of huMNC2-CAR44 T cells on MUC1* positive DU145 prostate cancer cells as measured by a variety of assays. FIG. 84A is a fluorescent photograph of untransduced T cells co-cultured with the prostate cancer cells, wherein granzyme B is stained with a red fluorophore. FIG. X4B is the DAPI and granzyme B merge. FIG. 84C is a fluorescent photograph of huMNC2-CAR44 T cells co-cultured with the prostate cancer cells, wherein granzyme B is stained with a red fluorophore. FIG. 84D is the DAPI and granzyme B merge. FIG. 84E is a FACS scan for fluorescently labeled granzyme B for untransduced T cells incubated with the cancer cells. FIG. 84F is a FACS scan showing a positive increase in fluorescently labeled granzyme B for huMNC2-CAR44 T cells incubated with the cancer cells. FIG. 84G is a graph of the mean fluorescent intensity. FIG. 84H is an xCELLigence scan tracking the real-time killing of DU145 cancer cells by huMNC2-CAR44 T cells (blue trace) but not by untransduced T cells (green). FIGS. 85A-85H show the cytotoxic effect of huMNC2-CAR44 T cells on MUC1* positive CAPAN-2 pancreatic cancer cells as measured by a variety of assays. FIG. 85A is a fluorescent photograph of untransduced T cells co-cultured with the pancreatic cancer cells, wherein granzyme B is stained with a red fluorophore. FIG. 85B is the DAPI and granzyme B merge. FIG. 85C is a fluorescent photograph of huMNC2-CAR44 T cells co-cultured with the pancreatic cancer cells, wherein granzyme B is stained with a red fluorophore. FIG. 85D is the DAPI and granzyme B merge. FIG. 85E is a FACS scan for fluorescently labeled granzyme B for untransduced T cells incubated with the cancer cells. FIG. 85F is a FACS scan showing a positive increase in fluorescently labeled granzyme B for huMNC2-CAR44 T cells incubated with the cancer cells. FIG. 85G is a graph of the mean fluorescent intensity. FIG. 85H is an xCELLigence scan tracking the real-time killing of CAPAN-2 cancer cells by huMNC2-CAR44 T cells (blue trace) but not by untransduced T cells (green). FIGS. 86A-86C show xCELLigence scans tracking the real-time killing of MUC1* positive cancer cells, but not MUC1* negative cells, by huMNC2-CAR44 T cells. FIG. 86A shows that huMNC2-CAR44 T cells effectively kill HCT colon cancer cells that have been stably transfected with MUC1*. FIG. 86B shows that huMNC2-CAR44 T cells have almost no effect on HCT-MUC1-41TR, which is a MUC1 negative cancer cell that has been stably transfected with a MUC1 full-length. In this cell line only about 10% of the cell have MUC1 cleaved to MUC1*. FIG. 86C shows that huMNC2-CAR44 T cells have no effect on HCT-116 cells, which is a MUC1 negative colon cancer cell line.

[0330] These data demonstrate that T cells transduced with a CAR wherein the antibody fragment targeting head is MNC2, effectively kill MUC1* positive cancer cells. These data specifically show that huMNC2-scFV-CAR44 transduced into human T cells effectively kill MUC1* positive cancer cells. Because we and others have now demonstrated that the most important aspect of CAR T function is the targeting antibody fragment, it follows that an immune cell or a T cell transduced with any CAR having the antibody fragment MNC2-scFV or huMNC2-scFV would have similar efficacy against MUC1 or MUC1* positive tumors. For example, the hinge region that connects the scFv to the transmembrane portion could be any flexible linker. The intracellular co-stimulatory domains could be CD28-3zeta, CD28-4-1BB-3zeta or any combination of immune cell co-stimulatory domains.

[0331] Experiments were also performed exploring methods of pre-activating the CAR T cells to more effectively kill the target cancer cells. We first tested pre-stimulation of the CAR T cells using beads presenting anti-CD3 and anti-CD28 antibodies. This pre-stimulation increased the amount of cell killing but the increase was not specific for the target of the CAR. Rather, the CD3-CD28 stimulated CAR T cells non-specifically killed MUC1* positive and negative cells. We next tried pre-stimulating the CAR T cells with either beads or cancer cells that expressed the target of the antibody portion of the CAR. A synthetic MUC1*_{extra cellular domain} peptide was attached to either 1 μm or 4.5 μm beads. Anti-MUC1* CAR T cells were incubated with the peptide presenting beads for 12-24 hours. FIGS. 87A-87L show the untransduced T cells or the CAR T cells after 24 hour incubation with MUC1* peptide presenting beads. As can be seen, only the CAR transduced T cells show activation-induced clustering. The CAR T cells were separated from the beads by centrifugation, then analyzed by FACS to measure expression of T cell activation markers CD25, CD69 and granzyme B. As can be seen in FIGS. 88A-88D, T cell activation markers increase after incubation with MUC1* presenting beads if and only if the T cell had been transduced with a CAR whose extra cellular domain comprised an anti-MUC1* antibody fragment. In sharp contrast to pre-activation with CD3-CD28 beads, stimulation with MUC1* peptide beads only increased specific killing. There was no increase in the killing of MUC1* negative cells. FIGS. 89A-89C show xCELLigence scans that show the enhanced killing of bead-stimulated anti-MUC1* CAR T cells on human ovarian cancer cells, triple negative breast cancer cells and a MUC1 negative colon cancer cell line that was stably transfected with MUC1*. The enhanced killing capability of MUC1* peptide bead stimulated CAR T cells enabled the CAR T cells to effectively kill target cancer cells for longer periods of time and at much lower T cell to cancer cell ratios. In one aspect of the invention, CAR T cells are pre-stimulated by incubation with beads or surfaces that present a peptide derived from the MUC1* extra cellular domain, before administering to a patient diagnosed with or at risk of developing a MUC1* positive cancer.

[0332] We also tested pre-activating CAR T cells by incubating them with cancer cells that present the target antigen. We incubated huMNC2-CAR44 T cells with HCT-MUC1* cells for 12-24 hours. This pre-stimulation was done once, twice, three or four times. Target cell pre-stimulation also greatly enhanced the specific killing of CAR T cells. As can be seen in FIGS. 90A-90D, specific cell killing by the cancer cell stimulated CAR T cells increased their killing potential even at low CAR T to cancer cell ratios and for longer periods of time. FIGS. 90A-90D show cancer cell stimulated huMNC2-scFv-CAR44 transduced human T cells effectively kill T47D breast cancer cells, BT-20 triple negative breast cancer cells, SKOV-3 ovarian cancer cells and HCT-MUC1* cancer cells. In one aspect of the invention, CAR T cells are pre-stimulated by incubation with MUC1* expressing cells, which may be cancer cells, before administering to a patient diagnosed with or at risk of developing a MUC1* positive cancer. In a preferred embodiment, the MUC1* stimulation cells are UV or chemically inactivated before co-culture with the CAR T cells.

[0333] huMNC2-scFv-CAR44 transduced human T cell that were bead stimulated (Protocol 1) or cancer cell stimulated (Protocol 2) were tested for their ability to inhibit tumor growth in animals. Human cancer cells that had been stably transfected with Luciferase were injected into female NOD/SCID/GAMMA (NSG) mice between 11 and 15 weeks of age. In one experiment, 500,000 HCT-MUC1* cancer cells were injected sub-cutaneously into a rear flank. Tumor engraftment was verified by injecting the animals with Luciferin and then imaging the fluorescent cancer cells using an IVIS instrument. IVIS images taken Day 5 post implantation showed the presence of tumor cells. On Day 6 and on Day 12, 10M huMNC2-scFv-CAR44 T cells were administered to the animals. 5M of the CAR T cells were administered by intratumor injection and the other 5M were administered by tail vein injection. Control groups were injected by same administration routes with either the same number of untransduced T cells or same volume of PBS. IVIS measurements of tumor burden were taken on Days 7, 11, 13, and 21. As can be seen in FIGS. 91A-91Y, both groups of control mice had tumors that continuously grew, whereas the mice treated with bead-stimulated huMNC2-scFv-CAR44 T cells have no detectable cancer cells by Day 21. Three (3) of the five (5) mice treated with cancer cell-stimulated huMNC2-scFv-CAR44 T cells have no detectable cancer cells by Day 21. The other two (2) mice have a barely detectable number of cancer cells remaining by Day 21.

[0334] huMNC2-scFv-CAR44 transduced human T cell that were bead stimulated (Protocol 1) or cancer cell stimulated (Protocol 2) were also tested for their ability to inhibit tumor growth in animals. Human cancer cells that had been stably transfected with Luciferase were injected into female NOD/SCID/GAMMA (NSG) mice between 11 and 15 weeks of age. In another experiment, 500,000 BT-20 MUC1* positive triple negative breast cancer cells were injected sub-cutaneously into a rear flank. Tumor engraftment was verified by injecting the animals with Luciferin and then imaging the fluorescent cancer cells using an IVIS instrument. IVIS images taken Day 6 post implantation showed the presence of tumor cells. On Day 6, after IVIS imaging, 10M huMNC2-scFv-CAR44 T cells were administered to the animals. 5M of the CAR T cells were administered by intratumor injection and the other 5M were administered by tail vein injection. Control group was injected by same administration routes with the same number of untransduced T cells. IVIS measurements of tumor burden were taken on Days 6, 8, and 12. As can be seen in FIGS. 92A-92J, both groups of mice treated with huMNC2-CAR44 T cells showed a decrease in tumor burden compared to the control group.

[0335] huMNC2-scFv-CAR44 transduced human T cell that were bead stimulated (Protocol 1) were also tested for their ability to inhibit ovarian cancer growth in animals. Human SKOV-3 MUC1* positive ovarian cancer cells that had been stably transfected with Luciferase were injected into female NOD/SCID/GAMMA (NSG) mice between 11 and 15 weeks of age. In one experiment, 500,000 SKOV-3 cancer cells were injected into the intraperitoneal cavity to mimic metastatic ovarian cancer in humans. Tumor engraftment was verified by injecting the animals with Luciferin and then imaging the fluorescent cancer cells using an IVIS instrument. IVIS images taken Day 3 post implantation showed the presence of tumor cells. On Day 4 and Day 11, post tumor implantation, 10M huMNC2-scFv-CAR44 T cells were IP administered to the animals. On Day 4, CAR T cells were IP injected. On Day 11 half the CAR T cells were injected into the intraperitoneal space and the other half was injected into the tail vein. Control groups were injected by same administration routes with either the same number of untransduced T cells or same volume of PBS. Subsequent IVIS measurements of tumor burden were taken on Day 7, Day 10 and Day 15. As can be seen in FIGS. 93A-93L, control mice have tumors that are growing at a much faster rate than the huMNC2-CAR44 T cell treated mice. FIG. 93M shows the IVIS color bar correlating photons/second to color.

[0336] One aspect of the invention is a method for treating a patient diagnosed with, suspected of having, or at risk of developing a MUC1 positive or MUC1* positive cancer, wherein the patient is administered an effective amount of immune cells that have been transduced with a MUC1* targeting CAR, wherein the CAR is chosen from among the group consisting of MN-E6-CD8-3z (SEQ ID NOS:294-295); MN-E6-CD4-3z (SEQ ID NOS:746-747); MN-E6-CD8-CD28-3z (SEQ ID NOS:297-298); MN-E6-CD4-CD28-3z (SEQ ID NOS:748-749); MN-E6-CD8-41BB-3z (SEQ ID NOS:300-301); MN-E6-CD4-41BB-3z (SEQ ID NOS:750-751); MN-E6-CD8-CD28-41BB-3z (SEQ ID NOS:303-304); MN-E6-CD4-CD28-41BB-3z (SEQ ID NOS:754-755); MN-E6scFv-Fc-8-41BB-CD3z (SEQ ID NOS:310-311); MN-E6scFv-IgD-Fc-8-41BB-CD3z (SEQ ID NOS:770-771); MN-E6scFv-FcH-8-41BB-CD3z (SEQ ID NOS:315-316); MN-E6scFv-IgD-FcH-8-41BB-CD3z (SEQ ID NOS:772-773); MN-E6scFv-Fc-4-41BB-CD3z (SEQ ID NOS:318-319); MN-E6scFv-FcH-4-41BB-CD3z (SEQ ID NOS:321-322); MN-E6scFv-IgD-8-41BB-CD3z (SEQ ID NOS:323-324); MN-E6scFv-IgD-4-41BB-CD3z (SEQ ID NOS:327-328); MN-E6scFv-X4-8-41BB-CD3z (SEQ ID NOS:330-331); MN-E6scFv-X4-4-41BB-CD3z (SEQ ID NOS:333-334); MN-E6scFv-8-4-41BB-CD3z (SEQ ID NOS:336-337), or any of the aforementioned CARs wherein the MN-E6 is replaced by MN-C2, MN-C3 or MN-C8; MN-C2-CD8-3z (SEQ ID NOS:606-607); MN-C2-CD4-3z (SEQ ID NOS:758-759); MN-C2-CD8-CD28-3z (SEQ ID NOS:608-609); MN-C2-CD4-CD28-3z (SEQ ID NOS:760-761); MN-C2-CD8-41BB-3z (SEQ ID NOS:610-611 and SEQ ID NOS:718-719); MN-C2-CD4-41BB-3z (SEQ ID NOS:762-763); MN-C2-CD8-CD28-41BB-3z (SEQ ID NOS:306-307); MN-C2-CD4-CD28-41BB-3z (SEQ ID NOS:766-767); MN-C2-Fc-8-41BB-CD3z (SEQ ID NOS:732-733); MN-C2-IgD-Fc-8-41BB-CD3z (SEQ ID NOS:734-735); MN-C2-FcH-8-41BB-CD3z (SEQ ID NOS:736-737); MN-C2-IgD-FcH-8-41BB-CD3z (SEQ ID NOS:738-739); MN-C2-IgD-8-41BB-CD3z (SEQ ID NOS:740-741); MN-C2-X4-8-41BB-CD3z (SEQ ID NOS:742-743). Another aspect of the invention is a method for treating a patient diagnosed with, suspected of having, or at risk of developing a cancer, wherein the patient is administered an effective amount of immune cells that have been transduced with one of the aforementioned CARs wherein the MN-E6 is replaced by a peptide comprising antibody variable domain fragments that are specific for a cancer antigen. In any of the above methods, the immune cell may be a T cell and may further be isolated from the patient to be treated.

[0337] Other MUC1 Cleavage Sites

[0338] It is known that MUC1 is cleaved to the growth factor receptor form, MUC1*, on some healthy cells in addition to cancer cells. For example, MUC1 is cleaved to MUC1* on healthy stem and progenitor cells. A large percentage of bone marrow cells are MUC1* positive. Portions of the intestine are MUC1* positive.

[0339] The inventors have discovered that MUC1 can be cleaved at different positions that are relatively close to each other but the location of cleavage changes the fold of the remaining portion of the extracellular domain. As a result, monoclonal antibodies can be identified that bind to MUC1* cleaved at a first position but do not bind to MUC1* that has been cleaved at a second position. This discovery is disclosed in WO2014/028668, filed Aug. 14, 2013, the contents of which are incorporated by reference herein its entirety. We identified a set of anti-MUC1* monoclonal antibodies that bind to MUC1* as it appears on cancer cells but do not bind to MUC1* as it appears on stem and progenitor cells. Conversely, we identified a second set of monoclonal antibodies that bind to stem and progenitor cells but do not bind to cancer cells. One method used to identify stem specific antibodies is as follows: supernatants from monoclonal hybridomas were separately adsorbed onto 2 multi-well plates. Stem cells, which are non-adherent cells, were put into one plate and cancer cells which are adherent were put into an identical plate. After an incubation period, the plates were rinsed and inverted. If the non-adherent stem cells stuck to the plate, then the monoclonal antibody in that particular well recognizes stem cells and will not recognize cancer cells. Antibodies that did not capture stem cells or antibodies that captured cancer cells were identified as cancer specific antibodies. FACS analysis has confirmed this method works.

[0340] Antibodies MN-E6 and MN-C2 are examples of cancer-specific antibodies. Antibodies MN-C3 and MN-C8 are examples of stem-specific antibodies. Although both sets of antibodies are able to bind to a peptide having the PSMGFR sequence, FACS analysis shows that the anti-MUC1* polyclonal antibody and MN-C3 bind to MUC1* positive bone marrow cells but MN-E6 does not. The MUC1* polyclonal antibody was generated by immunizing a rabbit with the PSMGFR peptide. Similarly, MN-C3 binds to stem cells of the intestinal crypts but MN-E6 does not. Conversely, MN-E6 antibody binds to cancerous tissue while the stem-specific MN-C3 does not. Competition ELISA experiments indicate that the C-terminal 10 amino acids of the PSMGFR peptide are required for MN-E6 and MN-C2 binding, but not for MN-C3 and MN-C8. Therefore, another method for identifying antibodies that are cancer specific is to immunize with a peptide having the sequence of the PSMGFR peptide minus the 10 N-terminal amino acids or use that peptide to screen for antibodies or antibody fragments that will be cancer specific. Antibodies that bind to a peptide with a sequence of PSMGFR peptide minus the N-terminal 10 amino acids but do not bind to a peptide with a sequence of PSMGFR peptide minus the C-terminal 10 amino acids are cancer specific antibodies for use in the treatment or prevention of cancers.

[0341] The extracellular domain of MUC1 is also cleaved on stem cells and some progenitor cells, where activation of cleaved MUC1 by ligands NME1 in dimer form or NME7 promotes growth and pluripotency and inhibits differentiation. The transmembrane portion of MUC1 that remains after cleavage is called MUC1* and the extracellular domain is comprised essentially of the Primary Sequence of MUC1 Growth Factor Receptor (PSMGFR) sequence. However, the exact site of cleavage can vary depending on cell type, tissue type, or which cleavage enzyme a particular person expresses or overexpresses. In addition to the cleavage site that we previously identified which leaves the transmembrane portion of MUC1* comprising most or all of the PSMGFR SEQ ID NO:2, other cleavage sites result in an extended MUC1* comprised of most or all of SNIKFRPGSVVVQLTLAFREGTINVHDVETQFNQYKTEAASRY (SEQ ID NO:620); or SVVVQLTLAFREGTINVHDVETQFNQYKTEAASRY (SEQ ID NO:621). The site of MUC1 cleavage affects how the remaining extracellular domain folds. We have identified monoclonal antibodies that bind to cleaved MUC1* on cancer cells but do not bind to cleaved MUC1* as it exists on healthy stem and progenitor cells.

[0342] Whereas an anti-MUC1* antibody or antibody-like molecule may be most effective if it competitively inhibits the binding of NME1, NME6, NME8 or NME7 or NME7-AB to MUC1*, for example an antibody that binds to the PSMGFR sequence especially if said antibody is unable to bind to a PSMGFR peptide if the 10 C-terminal amino acids are missing, antibodies or antibody-like molecules that carry a payload need not competitively inhibit the binding of MUC1* ligands to be effective as anti-cancer agents. For example antibodies or antibody-like molecules that are conjugated to a toxin could be effective at killing target cancer cells without necessarily inhibiting binding of the activating ligands. For example, antibodies or antibody-like molecules incorporated into CAR Ts or BiTEs which recruit the patient's immune system to the tumor can be effective as anti-cancer agents even if the antibody fragment targets a portion of MUC1* such that antibody fragment binding does not competitively inhibit the binding of NME1, NME6, NME8, NME7-AB or NME7. In a preferred embodiment the antibody fragment incorporated into a CAR, an adaptive T cell receptor or a BiTE competitively inhibits the binding of NME1, NME6, NME8, NME7-AB or NME7 to MUC1*.

[0343] Antibodies that are able to bind to the extracellular domain of the remaining transmembrane portion block the interaction between the MUC1* extracellular domain and activating ligands and in this way can be used as therapeutic agents, for example for the treatment of cancers. Anti-MUC1* antibodies are also useful for the growth, delivery, identification or isolation of stem cells both in vitro and in vivo.

[0344] General Strategy for Using Antibodies, Antibody Fragments and CARs that Target the Extracellular Domain of MUC1*

[0345] Monoclonal antibodies MN-C3 and MN-C8 have a greater binding affinity for blood cells than solid tumor cancer cells. Humanized antibodies and antibody fragments containing sequences derived from the variable regions of MN-C3 and MN-C8 can be used as a stand alone therapy or integrated into CAR Ts, BiTEs, ADCs for the treatment of blood cancers.

[0346] Alternatively, humanized antibodies and antibody fragments containing sequences derived from the variable regions of MN-C3 and MN-C8 can be used to deliver stem cells to a specific location such as for in situ human therapeutics. In one case, a substrate coated with humanized MN-C3 or MN-C8 derived antibodies or antibody fragments is loaded with stem cells then inserted into a patient. In another case, a substrate coated with humanized MN-C3 or MN-C8 derived antibodies or antibody fragments is inserted into a patient in order to recruit the patient's own stem cells to a specific area for therapy. Human therapies in which antibodies that bind to human stem cells will be of therapeutic use include spinal cord repair. Substrates coated with humanized MN-C3 or MN-C8 derived antibodies or antibody fragments are also used to identify or isolate human antibodies. Humanized MN-C3 or MN-C8 derived antibodies can also be used to stimulate the growth of stem cells.

[0347] CARs and Cleavage Enzymes

[0348] Many applications of CAR T therapy are limited by the length or flexibility of the extracellular domain between the T cell membrane and the antibody fragment that will direct the T cell to the desired location. For example, the surface of solid tumor cancer cells is populated with a myriad of cell surface proteins and growth factor receptors. Many of these cell surface proteins have bulky extracellular domains that limit the access of immune cells, such as T cells or CAR T cells, to the tumor cell surface. In one example, MUC1 and the cleaved growth factor receptor form MUC1* are overexpressed on over 75% of solid tumor cancers and on some blood cancers. The extracellular domain of MUC1 full-length contains between about 1,500 and 2,500 amino acids while the extracellular domain of MUC1* contains only about 45 to 65 amino acids. Variability in the length of MUC1 full-length is due to variability in the number of tandem repeat units that are expressed. Variability in the length of MUC1* is due to different cleavage sites when MUC1 is cleaved by different cleavage enzymes. Whereas it is most desirable to get the T cell close to the surface of the cancer cell, access can be sterically hindered by neighboring proteins, including full-length MUC1, that have large and bulky extracellular domains. This is especially true for early stage cancers. Tissue studies show that early stage cancers have more full-length MUC1 than late stage cancers that can be devoid of any full-length MUC1. This problem can in some cases severely limit the efficacy of cancer immunotherapies, including CAR T, adaptive T cell therapy, BiTEs and other T cell engagers.

[0349] One solution to this problem is to express or activate cleavage enzymes in the area of the targeted tumor cells to cleave the bulky proteins that restrict access of T cells to the tumor. FIGS. 94A-94B show a cartoon of a CAR T cell that when near the tumor, expresses a cleavage enzyme that then cleaves MUC1 to MUC1*.

[0350] In one aspect of the invention, the cleavage enzyme and the CAR are transduced into the same T cell. In another aspect of the invention, the cleavage enzyme is on an inducible promoter such that its expression is activated when the CAR engages the targeted cancer cells. In some cases, the expression of the cleavage enzyme is controlled by an inducible promoter. In one aspect of the invention, expression of the cleavage enzyme is induced when the immune cell is activated, for example when it recognizes or engages its target. In one example, a T cell is transfected or transduced with a cleavage enzyme whose expression is induced when the T cell recognizes a target cancer cell. One way to do this is to induce expression of the cleavage enzyme when, or shortly after, an NFAT protein is expressed or translocated to the nucleus. For example, a sequence derived from an NFAT promoter region is put upstream of the gene for the cleavage enzyme. In this way, when the transcription factors that bind to the promoter of the NFAT protein are present in sufficient concentration to bind to and induce transcription of the NFAT protein, they will also bind to that same promoter that is engineered in front of the sequence for transcription of the cleavage enzyme. The NFAT protein may be NFAT1 also known as NFATc2, NFAT2 also known as NFATc or NFATc1, NFAT3 also known as NFATc4, NFAT4 also known as NFATc3, or NFAT5. In one aspect of the invention, the NFAT is NFATc1, NFATc3 or NFATc2. In one aspect of the invention, the NFAT is NFAT2 also known as NFATc1. SEQ ID NO:646 shows nucleic acid sequence of the upstream transcriptional regulatory region for NFAT2. The promoter sequence for NFAT gene may include the nucleic acid sequence of SEQ ID NO:781-783 or SEQ ID NO:815 as examples, but it can be seen that the optimal sequence or minimal sequence for expression of the cleavage enzyme may be obtained by making fragments, extensions or mutations of the promoter and testing for the strength of the promoter with respect to expression of the cleavage enzyme. In one aspect of the invention, the transcriptional regulatory region for NFAT2 is engineered upstream of the gene encoding the cleavage enzyme MMP9 (SEQ ID NO:647) or the catalytic sub-unit of MMP9 (SEQ ID NO:648). In one aspect of the invention, the NFAT is NFATc3 and the promoter sequence of NFATc3 includes nucleic acid sequences from SEQ ID NO:816. In one aspect of the invention, the transcriptional regulatory region for NFATc3 is engineered upstream of the gene encoding the cleavage enzyme MMP9 (SEQ ID NO:647) or the catalytic sub-unit of MMP9 (SEQ ID NO:648). In another aspect of the invention, the NFAT is NFATc2. SEQ ID NO:817-818 shows nucleic acid sequence of the upstream transcriptional regulatory region for NFATc2. In one aspect of the invention, the transcriptional regulatory region for NFATc2 is engineered upstream of the gene encoding the cleavage enzyme MMP9 (SEQ ID NO:647) or the catalytic sub-unit of MMP9 (SEQ ID NO:648).

[0351] Another method for having the expression of the cleavage enzyme induced when the T cell or CAR T cell is activated is to have the gene for the cleavage enzyme on an inducible promoter where the NFAT protein itself binds to and induces transcription of the cleavage enzyme. In this case, an NFAT response element (NFAT RE) may be positioned upstream of the gene for the cleavage enzyme or fragment of the cleavage enzyme. The NFAT may bind to its responsive element upstream of the cleavage enzyme alone or as part of a complex. The NFAT protein may be NFATc1, NFATc2, NFATc3, NFATc4, or NFAT5. In a preferred embodiment, the NFAT protein is NFAT2 aka NFATc1, aka NFATc. The gene of the cleavage enzyme or fragment thereof is cloned downstream of an NFAT-response element (SEQ ID NO:649), which may be repeats of the response element (SEQ ID NO:650) and CMV minimal promoter (mCMV) (SEQ ID NO:651) to induce expression of cleavage enzyme by NFAT protein. The NFAT response element may include nucleic acid sequence of NFAT consensus sequence (SEQ ID NO:804). The NFAT response element may include the nucleic acid sequence of SEQ ID NOS:805-814 as examples, but it can be seen that the optimal sequence or minimal sequence for expression of the cleavage enzyme may be obtained by making fragments, extensions or mutations of the responsive element nucleic acid and testing for the strength of the responsive element with respect to expression of the cleavage enzyme. The enhancer region of Foxp3 also contains NFAT response elements within the 120-bp from 2079 to 2098 (SEQ ID NO:821). The NFAT response element may include nucleic acid NFAT consensus sequence of (5′-cattttttccat-3′) (SEQ ID NO:819) or (5′-tttttcca-3′) (SEQ ID NO:820), which NFATc1 specifically binds to (Xu et al., Closely related T-memory stem cells correlate with in vivo expansion of CAR. CD19-T cells and are preserved by IL-7 and IL-15, Blood 2014 123:3750-3759), or repeats thereof. The NFAT response elements may also be separated by nucleic acid spacer sequences. Other NFAT responsive elements may exist and may further be discovered, and a skilled artisan in the art when directed to determine NFAT responsive element may do so by carrying out molecular biological assays to obtain it given the guidance of at least the responsive elements as set forth as SEQ ID NOS: 804-814 albeit as only mere examples. In one aspect of the invention, the cleavage enzyme that is downstream of the NFAT-response element and CMV minimal promoter is MMP9 (SEQ ID NO:652). In another aspect of the invention, the cleavage enzyme is a catalytic sub-unit of MMP9 (SEQ ID NO:653).

[0352] Because NFATs 1-4 are regulated by the calcineurin pathway, potential toxicities that may arise in a patient can be stopped by treatment with an immunosuppressive agent such as FK506, Cyclosporin, Cyclosporin A, or Tacrolimus that block calcineurin activity and inhibit NFAT translocation to the nucleus. The T cell transduced or transfected with a cleavage enzyme on an inducible promoter may also be transfected or transduced with a CAR that recognizes a protein or molecule on the cancer cell. In a specific example, the cleavage enzyme is one that is able to cleave MUC1 full-length and the CAR bears an antibody fragment that directs it to MUC1* on the surface of cancer cells.

[0353] To determine which cleavage enzymes cleave MUC1 on cancer cells, we tested a series of MMP and ADAM enzyme inhibitors. These experiments pointed to MMP9 as being an important cleavage enzyme in cancer cells. To confirm that MMP9 cleaves MUC1 on cancer cells, we transfected HCT-116 MUC1 negative colon cancer cells with a mimic of full-length MUC1 having 41 tandem repeat domains: HCT-MUC1-41TR. Through single cell cloning we were able to establish this cell line wherein MUC1 only minimally gets cleaved to MUC1*. FIGS. 95A-95D show Western blots and FACS analysis showing that HCT-MUC1-41TR is 95% positive for full-length MUC1 and only 5-10% positive for the cleaved form, MUC1*. HCT-MUC1-41TR cells were incubated with MMP9 at varying concentrations and then assayed by immunofluorescence to measure binding of MNC2 monoclonal antibody to the resultant cells. As can be seen in FIGS. 96A-96E, binding of MNC2 increased as the concentration of MMP9 added to the cells increased. These experiments show that MMP9 cleaves MUC1 to a form that is recognized by MNC2. The human cancer tissue array studies we performed (FIG. 69A-69D, FIG. 70A-70F, FIG. 71A-71F, FIG. 72A-72F, FIG. 73A-73F) show that MNC2 recognizes the form of cleaved MUC1 that is present on cancerous tissue but not on healthy cells or tissues (FIG. 74A-74I). Importantly, MNC2 does not recognize the form of cleaved MUC1 that is expressed on healthy hematopoietic stem cells of the bone marrow.

[0354] In one aspect of the invention, an immune cell is transduced with both a CAR to target the immune cell to the tumor, and a cleavage enzyme. The CAR and the cleavage enzyme can be encoded on the same plasmid or on two different plasmids. In one aspect, the cleavage enzyme is on an inducible promoter. In another aspect, expression of the cleavage enzyme is induced by a protein that is expressed when the immune cell is activated. In one case, expression of the cleavage enzyme is induced by an NFAT protein. In another aspect, expression of the cleavage enzyme is induced by NFATc1. In another aspect, expression of the cleavage enzyme is induced when one of the NFAT proteins binds to an NFAT response element that is inserted upstream of the gene for the cleavage enzyme or a catalytically active fragment thereof. In one aspect, the cleavage enzyme is MMP9 or a fragment of MMP9 that is catalytically active.

[0355] In one aspect of the invention, the cleavage enzyme is MMP9 (SEQ ID NO:643). Some cleavage enzymes are naturally expressed as pro-enzymes that need to be activated. This can be accomplished by biochemical means, by expressing a co-enzyme that activates a cleavage enzyme or by engineering the enzyme in an activated form. The invention anticipates overcoming this problem by co-expressing the cleavage enzyme with its activator. In one aspect of the invention, the cleavage enzyme is MMP9 and the co-activator is MMP3. In another aspect of the invention, the cleavage enzyme is expressed in a form that is already active, for example by expressing a fragment of the cleavage enzyme that still has catalytic function. In one case, the cleavage enzyme is an MMP9 fragment that is catalytically active. One example of an MMP9 catalytic fragment is given as SEQ ID NO:645.

[0356] MMP9, which must be activated by MMP3, is overexpressed in a large percentage of solid tumors. Further, it is known that MNC2 anti-MUC1* monoclonal antibody recognizes MUC1 after it is cleaved by MMP9. The breast, ovarian, pancreatic and lung cancer arrays that were shown in FIGS. 69-73 were probed with MNC2-scFv, further indicating that MUC1 in these cancers is being cleaved by MMP9. To see if cleavage of tumors by MMP9 would increase T cell access to the tumor, we did a series of experiments using a cell line that expresses full-length MUC1, HCT-MUC1-41TR, a breast cancer cell line that is a high expresser of both full-length MUC1 and MUC1* and a MUC1 negative cell line that we transfect with MUC1*45. We transfected cells with MMP9 and MMP3, which activates MMP9. We took the supernatant of those cells, which contained activated MMP9, and added it to the various cells, which were then co-cultured with T cells transduced with an anti-MUC1* CAR: huMNC2-CAR44. The result was greatly increased CAR T cell killing of the targeted MUC1/MUC1* positive cancer cells, compared to the control cells that were not incubated with a MUC1 cleavage enzyme.

[0357] APMA is a biochemical that activates MMPs. We used APMA along with the conditioned media of cells that we transfected with either MMP9 or ADAM17 to see if any of these cleavage enzymes would cleave MUC1 on the HCT-MUC1-41TR cell line that only expresses full-length MUC1. As controls, we also tested the enzymes on HCT-MUC1* cells. The MUC1 and MUC1* expressing cells were stained with a red dye, CMTMR. Human T cells that were transduced with an anti-MUC1* CARs, CAR44 or CAR50 were co-cultured with the cancer cells. Untransduced T cells were used as a control. As can be seen in FIGS. 75B, 75C, and 75D, the anti-MUC1* CAR T cells effectively recognized and clustered the HCT-MUC1* cancer cells, which is a sign of T cell activation and killing. However, no CAR T cell induced clustering is visible in the wells containing HCT-MUC1-41TR, the full-length MUC1 expressing cells (FIGS. 75F, 75G, and 75H). However, the cells that were incubated with activated MMP9 show dramatic increase in CAR T cell induced clustering (FIGS. 75J, 75K, and 75I), implying that MMP9 cleaved the full-length MUC1 to a form of MUC1* that is recognized by MNC2 monoclonal antibody and more specifically by huMNC2-scFv. ADAM17 had no apparent effect. ADAM17 either did not cleave MUC1 or cleaved it at a position that is not recognized by MNC2, which is more likely.

[0358] We performed the same experiment, this time using T47D breast cancer cells that were hard to kill using anti-MUC1* CAR T cells presumably because they express high levels of full-length MUC1 as well as MUC1*. As can be seen in FIGS. 76B, 76C, and 76D, anti-MUC1* CAR44 and CAR50 have little effect on the T47D cancer cells. Only in FIG. 76D, which is CAR44 at the highest level of CAR expression in the T cells, do we see a small amount of CAR T cell induced clustering. However, the presence of activated MMP2 (FIGS. 76J, 76K, 76L) or activated MMP9 (FIGS. 76R, 76S, 76T) shows a dramatic increase in CAR T cell recognition, clustering and killing, showing that cleavage of full-length MUC1 increases T cell access to the cancer cells.

[0359] In another example, T47D MUC1 positive tumor cells were incubated with a recombinant catalytic domain of MMP9 (Enzo Life Sciences, Inc., Farmingdale, N.Y.) at either 100 ng/mL or 500 ng/mL. Western blot analysis showed that the MUC1/MUC1* positive cancer cells underwent extensive cleavage of MUC1 to MUC1*. In another example, T47D breast cancer cells were pre-incubated with a human recombinant MMP9 catalytic domain protein then co-cultured with anti-MUC1* CAR44 T cells. The specific killing of the T47D cells by CAR44 T cells was monitored in real-time on an xCelligence instrument that measures impedance as a function of time. This analysis uses electrode arrays upon which cancer cells are plated. The adherent cancer cells insulate the electrode and cause an increase in impedance as they grow. Conversely, T cells are not adherent and remain in suspension so do not increase or decrease impedance. However, if the T cells or CAR T cells kill the cancer cells on the electrode plate, the cancer cells ball up and float as they die, which causes the impedance to decrease. The addition of MMP9 catalytic domain dramatically increased the killing of T47D cancer cells. FIG. 78 shows an xCelligence graph of T47D breast cancer cells in co-culture with either untransduced T cells, as a control, or huMNC2-CAR44 T cells over a 45 hour period. After 18 hours of cancer cell growth, a catalytic sub-unit MMP9 was added to some of the cells. At 25 hours, T cells were added. As can be seen, huMNC2-CAR44 T cell killing is greatly improved when the T47D cells are pre-incubated with cleavage enzyme MMP9. In the xCelligence system, target cancer cells, which are adherent, are plated onto electrode array plates. Adherent cells insulate the electrode and increase the impedance. The number of adherent cancer cells is directly proportional to impedance. T cells are not adherent and do not contribute to impedance. Therefore, increasing impedance reflects growth of cancer cells and decreasing impedance reflects killing of cancer cells. Prostate cancer cell line DU145 expresses both MUC1 and MUC1* but at a much lower level of expression than T47D cells. DU145 cells are efficiently killed by anti-MUC1* CAR T cells in the presence or absence of a cleavage enzyme.

[0360] FIG. 79 shows an xCelligence graph of DU145 prostate cancer cells in co-culture with either untransduced T cells, as a control, or huMNC2-CAR44 T cells over a 45 hour period. After 18 hours of cancer cell growth, a catalytic sub-unit MMP9 was added to some of the cells. At 25 hours, T cells were added. As can be seen, huMNC2-CAR44 T cell killing of low density MUC1/MUC1* positive cancer cells is not affected by pre-incubation with cleavage enzyme MMP9. DU145 cancer cells express a significantly lower amount of MUC1 which includes the full-length form as well as MUC1*. The lower density of full-length MUC1 does not sterically hinder T cell access to the membrane proximal MUC1*. DU145 cells represent an early stage cancer that expresses both full length and cleaved MUC1 but at lower levels so that T cell access is not sterically hindered. T47D cells represent mid-stage cancers that express high levels of both MUC1 and MUC1*, wherein the density of MUC1 full-length sterically hinders access of T cells to the tumor. HCT-MUC1* cells are a MUC1 negative cell line that has been stably transfected with MUC1*₄₅, and they represent late stage cancer cells. It is significant that MUC1 cleaved to MUC1* by MMP9 is recognized by the anti-MUC1* antibody MNC2, which is the targeting head of the CAR. Immune cell access to tumor antigens on the cancer cell surface can be sterically hindered by the presence of bulky extra cellular domain proteins or other obstructing elements also known as the tumor micro-environment. The aforementioned serve as an example that can be extended to improve the efficacy of CAR T therapies that target other tumor antigens. In one aspect of the invention, an immune cell is transfected or transduced with both a CAR comprising an antibody fragment that targets a tumor antigen and a cleavage enzyme. In another aspect of the invention, an immune cell is transfected or transduced with both a CAR comprising an antibody fragment that targets a tumor antigen and a cleavage enzyme that cleaves a tumor antigen to a form recognized by the antibody fragment of the CAR. In one aspect, an immune cell is transfected or transduced with both a CAR comprising an antibody fragment that targets a tumor antigen and a cleavage enzyme that cleaves a tumor antigen to a form recognized by the antibody fragment of the CAR, wherein the antibody fragment of the CAR recognizes MUC1* extra cellular domain and the cleavage enzyme cleaves MUC1 to MUC1*. In one aspect, an immune cell, which may be a T cell or an NK cell, is transfected or transduced with a CAR comprising an antibody fragment derived from MNC2, MNE6, MNC3 or MNC8 and a cleavage enzyme chosen from the group comprising MMP1, MMP2, MMP3, MMP7, MMP8, MMP9, MMP11, MMP12, MMP13, MMP14, MMP16, ADAM9, ADAM10, ADAM17, ADAM 19, ADAMTS16, ADAM28 or a catalytically active fragment thereof.

[0361] A convenient method for testing the presence of MMP9 is with a fluorogenic assay, for example using the OMNIMMP peptide assay kit. The kits have a peptide that is an MMP9 substrate that has been derivatized with a masked fluorophore. When MMP9 is added to a solution containing the peptide, MMP9 cleaves the peptide at a position that unmasks the fluorophore and the fluorescence can be read on a plate reader. MMP-9 activity is read in Relative Fluorescent Units (RFUs) which is an arbitrary value related to the amount of light detected by a plate reader set to excite each well containing samples at 328 nm and measure the emission at 393 nm. An increase in RFUs indicates cleavage of the Gly-Leu bond, unmasking of the fluorophore and therefore the presence of MMP-9. The sequence of the OMNIMMP peptide is Mca-Pro-Leu-Gly-Leu-Dpa-Ala-Arg-NH₂. AcOH [Mca=(7-methoxycoumarin-4-yl)acetyl; Dpa=N-3-(2,4-dinitrophenyl)-L-α,β-diaminopropionyl]. FIG. 97 shows a graph of the OMNIMMP fluorogenic peptide substrate of MMP9 being cleaved by MMP9 catalytic domain and emitting fluorescence. The MMP9 catalytic domain was added at two concentrations in either PBS, solid trace, or cell culture media, dashed trace. This experiment shows that the OMNIMMP peptide assay will measure the activity of MMP9 that has been secreted by cells even if they are in cell growth media.

[0362] A method for studying activation of the NFAT pathway is by chemically activating the pathway using PMA with lonomycin (Lyakh et al., Expression of NFAT-Family proteins in normal human T cells, MOLECULAR AND CELLULAR BIOLOGY, Vol. 17, No. 5, May 1997, p. 2475-2484; Rao et al., Transcription factors of the NFAT family—Regulation and function, Annu. Rev. Immunol. 1997. 15:707-47; Macian, NFAT proteins—Key regulators of T-cell development and function, Nature Reviews Immunology, Vol. 5, pp 472-484 June (2005)). It has been demonstrated that PMA and lonomycin induce expression of NFAT proteins. The above-cited references show a scheme of the regulation of NFAT activation. Ionomycin increases calcium which activates the Calcineurin/Calmodulin complex. Calcineurin/Calmodulin dephosphorylate NFAT, which causes NFATs, especially NFATc1, to be translocated to the nucleus where it binds to DNA to stimulate transcription of target genes. NFATc1 is one of the first NFAT proteins to be translocated to the nucleus upon T cell activation and it is only there transiently before it exits the nucleus. Therefore, PMA plus lonomycin activation of cells we transfected or transduced with NFAT inducible cleavage enzymes is physiologically relevant and mimics in vivo T cell activation turning on expression of the NFAT inducible cleavage enzymes described herein.

[0363] The HEK293T cell line (human embryonic kidney cell), originally referred as 293tsA1609neo, is a highly transfectable derivative of human embryonic kidney 293 cells, and contains the SV40 T-antigen. This cell line is competent to replicate vectors carrying the SV40 region of replication. It gives high titers when used to produce retroviruses. It has been widely used for retroviral production, gene expression and protein production. HEK293T cells were used in some of the early experiments, before the plasmids were inserted into lenti viral vectors and transduced into human T cells.

[0364] A plasmid was constructed then transfected into HEK293T cells, wherein the gene for MMP9 catalytic domain was inserted downstream of either 3 or 4 NFAT response elements. The NFAT pathway was activated by the addition of PMA at 10 ng/mL and lonomycin at either 1 uM or 2 uM. Lysate from cells transfected with the plasmid containing 3 or 4 repeats of a NFAT Response element, or the conditioned media from the cells, were assayed for the presence of MMP9 in a Western blot assay. As can be seen in FIGS. 98A-98E only the cells that contained the NFAT response elements upstream of the MMP9 and also wherein the NFAT pathway was activated by PMA/Ionomycin, was MMP9 detectable from the lysates and conditioned media. In addition, the amount of MMP9 expressed or secreted was proportional to the concentration of the NFAT pathway activators. We next tested the MMP9 from the lysate and also the MMP9 that was secreted into the conditioned media to see if it was active and able to cleave the MMP9 substrate. FIGS. 99A-99B show graphs of a fluorogenic peptide substrate of MMP9 being cleaved by the cell lysate or conditioned media of HEK293T cells that were transfected with a plasmid containing an MMP9 gene downstream from 4 repeats of an NFAT response element. The MMP9 peptide substrate assay shows that activation of the NFAT pathway by PMA/ionomycin caused an MMP9 to be expressed and secreted and that it was active as evidenced by its ability to cleave a peptide substrate.

[0365] We also tested whether the native leader sequence that is in front of the MMP9 gene is essential or if it could be replaced by other leader sequences that might increase its expression or secretion from the cells. These next experiments showed that the native MMP9 leader sequence can be replaced with other leader sequences. FIGS. 100A-100D show NFAT-induced MMP9 catalytic domain expressed in HEK293T cells wherein the native leader sequence of MMP9 has been replaced by an IgK leader sequence and MMP9 catalytic domain is downstream of 4 repeats of an NFAT response element. FIG. 100A shows photograph of Western blot detecting expression of MMP9 in the cell lysate after activation of the NFAT pathway. FIG. 100B shows photograph of Western blot detecting expression of MMP9 in the conditioned media after activation of the NFAT pathway. FIG. 100C shows graph of MMP9 fluorogenic peptide substrate cleavage by MMP9 catalytic domain expressed and secreted in conditioned media of HEK293T cells wherein the native leader sequence of MMP9 has been replaced by an IgK leader sequence and MMP9 catalytic domain is downstream of 4 repeats of an NFAT response element. FIG. 100D shows graph of MMP9 fluorogenic peptide substrate cleavage by MMP9 catalytic domain expressed and secreted in conditioned media of HEK293T cells wherein the native leader sequence of MMP9 has been replaced by an IgK leader sequence and MMP9 catalytic domain is downstream of 4 repeats of an NFAT response element. FIGS. 101A-101C show MMP9 can be expressed with different leader sequences and also show subsequent activity of each. FIG. 101A shows a Western blot detecting an MMP9 protein in cell lysate wherein the leader sequence upstream of the MMP9 gene is either its native sequence or an IgK sequence. FIG. 101B shows a Western blot detecting MMP9 in conditioned media wherein the leader sequence upstream of the MMP9 gene is its native sequence or an IgK sequence. FIG. 101C shows a graph of an MMP9 peptide substrate cleaved by the expressed MMP9.

[0366] To design a construct that will have cleavage enzyme expression induced by proteins that are expressed or are translocated to the nucleus only after T cell activation, it is possible to have the enzyme gene downstream of response elements or downstream of the promoter of that cleavage enzyme. Another plasmid was made in which the gene for an MMP9 catalytic domain was inserted downstream from a portion of the promoter of NFATc1. The experiments shown in FIGS. 102A-102B compare expression levels of MMP9 expressed off of the NFATc1 promoter or off of 4 repeats of an NFAT response element. They show that both approaches work well. FIGS. 102A-102B show 3 clones 4, 6 and 7 of cells transfected with a plasmid that produces an NFAT inducible MMP9 wherein the NFATc1 promoter sequence is upstream of the MMP9 gene, which in this case is a truncated MMP9 comprising its catalytic domain. Also shown for comparison is a cell transfected with a plasmid that produces an NFAT inducible MMP9 wherein 4 repeats of an NFAT response element sequence are upstream of an MMP9 gene. FIG. 102A shows a Western blot detecting an MMP9 protein in cell lysate. FIG. 102B shows a Western blot detecting MMP9 in the conditioned media. FIGS. 103A-103B show that the MMP9 in the cleared lysate and the MMP9 in the conditioned media are also active as they cleave the MMP9 substrate in the peptide fluorogenic assay.

[0367] We next tested whether or not the NFAT-inducible MMP9 would work in human T cells and if it would specifically be expressed and secreted after T cell activation. To test this, the construct having 4 repeats of the NFAT response element were incorporated into a lenti viral vector. Human T cells were transduced with either an NFAT-inducible MMP9 alone, a CAR44 alone or both CAR44 and an NFAT-inducible MMP9. In some cases, the transduced T cells were activated by incubating them with beads coated with anti-CD3 and anti-CD28, which are known to activate T cells. In other cases, the transduced T cells were activated by co-culturing them with beads presenting the synthetic MUC1* peptide or by co-culturing with MUC1* positive cancer cells such as HCT-MUC1* cells.

[0368] FIGS. 104A-104B show the results of the OMNIMMP9 fluorogenic substrate assay that measures activity of MMP9. Conditioned media from human T cells transduced with NFAT-inducible MMP9 alone or in combination with CAR44 were added to the assay and MMP9 substrate cleavage was measured as a function of time. FIG. 104A shows MMP9 activity when human T cells were transduced with both CAR44 and an NFAT-inducible MMP9 after the cells were activated by co-culturing with HCT-MUC1* cancer cells. The trace that does not show increased substrate cleavage as a function of time is the conditioned media from cells that were not activated. FIG. 104B shows MMP9 activity when human T cells were transduced with just an NFAT-inducible MMP9 after the cells were activated by co-culturing with beads coated with anti-CD3 and anti-CD28 which are known to activate T cells. The trace that does not show increased substrate cleavage as a function of time is the conditioned media from cells that were not activated. FIGS. 105A-105E show photographs of Western blots of human T cells transduced with either CAR44 alone, NFAT-inducible MMP9 alone or transduced with both CAR44 and NFAT-inducible MMP9, wherein the resultant T cells are either not activated, chemically activated by PMA/Ionomycin, activated by co-culturing with beads presenting synthetic MUC1* peptide or co-culturing with MUC1* positive cancer cells. Western blot was probed with an anti-Flag tag also known as DYK tag antibody. Catalytic domain of MMP9 runs with an apparent molecular weight of about 40 kDa. FIGS. 105A-105D show photographs of Western blots of cleared cell lysates. FIG. 105A has Lanes 1-7 loaded with lysates of: Lane 1: T cells transduced with CAR44 and not activated; Lane 2: T cells transduced with CAR44 and activated with beads presenting synthetic MUC1* extra cellular domain peptide; Lane 3: T cells transduced with CAR44 and activated by co-culture with HCT-MUC1* cancer cells; Lane 4: T cells transduced with CAR44 and NFAT-inducible MMP9 but not activated; Lane 5: T cells transduced with CAR44 and NFAT-inducible MMP9 and activated with beads presenting synthetic MUC1* extra cellular domain peptide; Lane 6: T cells transduced with CAR44 and NFAT-inducible MMP9 and activated by co-culture with HCT-MUC1* cancer cells; Lane 7: an irrelevant protein also bearing the Flag DYK tag. Results show that T cells transduced with NFAT-inducible MMP9 only express MMP9 when they are activated by PMA/Ionomycin, MUC1* beads or MUC1* positive cancer cells. T cells transduced with both CAR44 and NFAT-inducible MMP9 only express MMP9 when the T cells are activated by stimulation with MUC1* beads or with MUC1* positive cancer cells. FIG. 105B has Lanes 1-7 loaded with lysates of: Lane 1: T cells transduced with CAR44 and not activated; Lane 2: T cells transduced with CAR44 and activated with beads presenting anti-CD3 and anti-CD28 antibodies that are known to activate T cells; Lane 3: T cells transduced with CAR44 and activated by co-culture with PMA/Ionomycin; Lane 4: T cells transduced with NFAT-inducible MMP9 but not activated; Lane 5: T cells transduced with NFAT-inducible MMP9 and activated with beads presenting anti-CD3 and anti-CD28 antibodies; Lane 6: T cells transduced with NFAT-inducible MMP9 and activated by PMA/Ionomycin; Lane 7: an irrelevant protein also bearing the Flag DYK tag. FIGS. 105C and 105D are darker exposures of the same Western blots shown in FIGS. 105A and 105B, respectively. FIG. 105E is a photograph of a Western blot of cell supernatants of cells transduced as follows: Lane 1: T cells transduced with CAR44 and not activated; Lane 2: T cells transduced with CAR44 and activated with beads presenting anti-CD3 and anti-CD28 antibodies that are known to activate T cells; Lane 3: T cells transduced with CAR44 and activated by co-culture with PMA/Ionomycin; Lane 4: T cells transduced with NFAT-inducible MMP9 but not activated; Lane 5: T cells transduced with NFAT-inducible MMP9 and activated with beads presenting anti-CD3 and anti-CD28 antibodies; Lane 6: T cells transduced with NFAT-inducible MMP9 and activated by PMA/Ionomycin; Lane 7: an irrelevant protein also bearing the Flag DYK tag. Results show that T cells transduced with NFAT-inducible MMP9 express MMP9 when they are activated. T cells transduced with both CAR44 and NFAT-inducible MMP9 are specifically activated when they are co-cultured with beads or cells presenting or expressing MUC1* (FIG. 105A Lane 5 and Lane 6).

[0369] In one aspect of the invention, a person diagnosed with cancer or at risk of developing cancer is administered a sufficient amount of an immune cell transduced with both a CAR and a cleavage enzyme. In another aspect of the invention, a person diagnosed with cancer or at risk of developing cancer is administered a sufficient amount of an immune cell transduced with both a CAR and a cleavage enzyme, wherein the cleavage enzyme is on an inducible promoter that is activated by proteins that are expressed when the immune cell becomes activated. In another aspect of the invention, a person diagnosed with cancer or at risk of developing cancer is administered a sufficient amount of an immune cell transduced with both a CAR and a cleavage enzyme, wherein the cleavage enzyme is on an inducible promoter that is activated by one or more NFAT. In one case the NFAT is NFATc1. In another aspect, the NFAT is NFATc3. In another aspect, the NFAT is NFATc2. In any of the instances above, the extra cellular domain of the CAR comprises a fragment of an anti-MUC1* antibody. In one aspect, the anti-MUC1* antibody is MNC2scFv or a humanized form of MNC2scFv. In another aspect, the anti-MUC1* antibody is MNE6scFv or a humanized form of MNE6scFv. In any of the instances above, the immune cell can be a T cell, an NK cell, a mast cell, or a dendritic cell.

[0370] It is not intended that the present invention be limited to one or two specific methods of having expression of a cleavage enzyme induced by an activated T cell. We have demonstrated specific expression of a cleavage enzyme only upon T cell activation by constructing a plasmid with the cleavage enzyme gene downstream of an NFAT promoter sequence or downstream of one or more repeats of NFAT response elements. In another aspect of the invention, expression of the cleavage enzyme is induced by constructing a plasmid where the cleavage enzyme gene is inserted downstream of an IL-2 promoter sequence or downstream of an IL-2 response element, then inserting the plasmid into an immune cell. In another aspect of the invention, expression of the cleavage enzyme is induced by constructing a plasmid where the cleavage enzyme gene is inserted downstream of a Calcineurin promoter sequence or downstream of a Calcineurin response element, then inserting the plasmid into an immune cell and then administering to a patient for the treatment or prevention of cancers. There are also drug-inducible plasmids that can be used to induce expression of the cleavage enzyme or used to stop expression induced by an element of an activated T cell. These drug inducible systems may include tetracycline-inducible systems, Tet-on, Tet-off, tetracycline response elements, doxycycline, tamoxifen inducible systems, ecdysone inducible systems and the like.

[0371] It is not intended that the present invention be limited to one or two specific promoters used in the plasmids encoding the CARs or inducible cleavage enzymes. As is known by those skilled in the art, many promoters can be interchanged including SV40, PGK1, Ubc, CAG, TRE, UAS, Ac5, polyhedron, CaMKIIa, GAL1, GAL10, TEF1, GDS, ADH1, CaMV35S, Ubi, H1 and U6. Another solution to the problem of steric hindrance of CAR T cell access, caused by bulky cell surface proteins such as MUC1-FL, is to increase the length of the linker region of the CAR that is expressed by the T cell. In standard design CARs, the length of the extracellular linker region between the transmembrane portion and the antibody fragment is about 45-50 amino acids in length. We made long-arm CARs where the length of the extracellular linker is extended from about 50 amino acids to 217-290 amino acids. Co-culture assays show that CARs with longer extracellular linkers have improved access to the tumor-associated antigen on the target cancer cells. A cartoon of this strategy is shown in FIGS. 106A-106E.

[0372] Published reports of CARs generally use a linker between the transmembrane domain and the antibody fragment, scFv, that is 45-50 amino acids in length and is often the sequence of the extracellular domain of CD8. CAR 44 is an anti-MUC1* CAR whose linker is derived from CD8 extracellular domain and is 45 amino acids in length. To demonstrate that long-arm CARs enable the T cell greater access to tumor associated antigens near the cell surface, we made a series of CARs wherein the anti-MUC1* antibody fragment was MNC2 scFv (SEQ ID NO:655) which was connected to the transmembrane domain via a panel of linkers of variable length and flexibility, wherein the transmembrane domain was that of CD8 (SEQ ID NO:657), followed by co-stimulatory domain 4-1BB (SEQ ID NO:659) then CD3-zeta (SEQ ID NO:661). A panel of linkers were incorporated into this model CAR. An IgG Fc domain which is 232 amino acids in length (SEQ ID NO:663) was used as a linker for an MNC2 CAR (SEQ ID NO:665). An IgD Fc domain which is 290 amino acids in length (SEQ ID NO:667) was used as a linker for an MNC2 CAR (SEQ ID NO:669). An IgG1 hingeless Fc domain linker which is 217 amino acids in length (SEQ ID NO:671) was used as a linker for an MNC2 CAR (SEQ ID NO:673). An IgD hingeless Fc domain linker which is 275 amino acids in length (SEQ ID NO:675) was used as a linker for an MNC2 CAR (SEQ ID NO:677). An IgD linker which is 58 amino acids in length (SEQ ID NO:679) was used as a linker for an MNC2 CAR (SEQ ID NO:681). An X4 linker which is 43 amino acids in length (SEQ ID NO:683) was used as a linker for an MNC2 CAR (SEQ ID NO:685).

[0373] These CARs with variable length linkers between the scFv and the transmembrane domain are: CAR15: huE6-IgD-CD8-41BB-3z (SEQ ID NO: 324); CAR16: muE6-IgD-CD8-41BB-3z (SEQ ID NO: 823); CAR17: muC2IgD-CD8-41BB-3z (SEQ ID NO: 825); CAR18: huE6-Fc-CD8-41BB-3z (SEQ ID NO: 311); CAR19: huE6-FcH-CD8-41BB-3z (SEQ ID NO: 316); CAR20: huE6-X4-CD8-41BB-3z (SEQ ID NO: 330); CAR33: huE6-IgD-CD441BB-3z (SEQ ID NO: 327); CAR34: huE6-Fc-CD441BB-3z (SEQ ID NO: 319); CAR35: huE6-FcH-CD441BB-3z (SEQ ID NO: 321); CAR36: huE6-X4-CD441BB-3z (SEQ ID NO: 334); CAR39: muE6-CD28-CD28-CD28-3z (SEQ ID NO: 827); CAR40: muC2-CD28-CD28-CD28-3z (SEQ ID NO: 829); CAR53: huC2-Fc-CD8-41BB-3z (SEQ ID NO: 665 and 733); CAR54: huC2-IgD+Fc-CD8-41BB-3z (SEQ ID NO: 669 and 735); CAR55: huC2-FcH-CD8-41BB-3z (SEQ ID NO: 673 and 737); CAR56: huC2-IgD+FcH-CD8-41BB-3z (SEQ ID NO: 677 and 739); CAR57: huC2-IgD-CD8-41BB-3z (SEQ ID NO: 681 and 741); CAR58: huC2-X4-CD8-41BB-3z (SEQ ID NO: 685 and 743); CAR63: huE6-IgD+Fc-CD8-41BB-3z (SEQ ID NO: 771); CAR64: huE6-IgD+FcH-CD8-41BB-3z (SEQ ID NO: 773); CAR42: hu co-CD19-IgD-CD8-41BB-3z (SEQ ID NO: 831). Additional details regarding these long linker CARs are shown in Table 1. Table 2 shows experimental activity of some of the CARs when transduced into human T cells and co-cultured with cancer cells.

[0374] In co-culture experiments, anti-MUC1* CARs with extracellular domain linkers of varying lengths were tested for their ability to specifically kill target MUC1/MUC1* positive cancer cells. xCELLigence scans shown in FIGS. 107A-107B show the results of one experiment. In this experiment the long linker CARs were transduced into human T cells then co-cultured with T47D breast cancer cells. However, some of the CARs that appear not to effectively kill the target cancer cells may just not have been efficiently expressed. Another experiment was performed in order to separate CAR expression from CAR efficacy. HEK293 adherent cells were transduced with a panel of CARs each having different length linkers. The CAR plasmid also carried a GFP marker so expression of each CAR could be measured by the amount of cells that were green. To these cells were added K562 suspension cells that had been stably transfected with MUC1*. K562-MUC1* cells were stained with a red dye, CMTMR. After wash steps, the amount of cells that were yellow (green plus red) indicates the ability of each of the CARs to recognize the target tumor antigen on a cancer cell. As can be seen in FIGS. 108A-108H, the expression levels of the CARs varies greatly. However, expression levels are easily optimized so does not constitute a problem. In looking at FIGS. 1081-108P the number of cells that appear yellow, versus those that remain green, gives more information about which CAR linkers are best to overcome steric hindrance of other surface molecules on the target cancer cells. A significant amount of target cancer cells bound to CAR-expressing cells for CARs having linkers derived from CD8, IgG1 FcH (hingeless), IgD and IgDFcH (hingeless). In addition to length, the linkers tested in these CARs are expected to vary in their rigidity.

[0375] Table 2 shows cytokine release data for human T cells transfected with some of the long linker CARs.

[0376] We note that “long-arm” CARs that have increased efficacy against solid tumor cancers can be guided by any antibody fragment that recognizes a tumor associated antigen, including MNE6 scFv, MNC2-scFv and other anti-MUC1* antibody fragments. Similarly, the transmembrane portion of the long-arm CARs can be derived from CD8, CD4 or other transmembrane domain. The intracellular tail of the CAR can be comprised of CD3-zeta and any other co-stimulatory domains or combinations thereof including CD28, 4-1BB, and OX40.

[0377] In another aspect, the invention is directed to a composition that includes at least two different plasmids transfected into the same immune cell, wherein the first encodes a CAR comprising an antibody fragment, scFv, or peptide that binds to a tumor antigen and the other encodes a gene that is not a CAR, wherein the gene that is not a CAR is expressed from an inducible promoter that is activated by elements of an activated immune cell. In one aspect, the immune cell is a T cell or an NK cell. In one aspect the CAR comprises an antibody fragment, scFv or peptide that binds to the extra cellular domain of MUC1*. In one aspect the CAR comprises an scFv derived from MNC2, MNE6, MNC3 or MNC8. In one aspect the non-CAR species is a cleavage enzyme. In one aspect the cleavage enzyme is MMP2, MMP3, MMP9, MMP13, MMP14, MMP16, ADAM10, ADAM17, ADAM28 or catalytically active fragments thereof. In another aspect the non-CAR species is a cytokine. In one aspect, the Cytokine is IL-7. In one aspect the cytokine is IL-15. In another aspect the cytokine is IL-7 and IL-15. In one case expression of the non-CAR species is induced by elements of an activated immune cell. In one aspect the element of an activated immune cell is an NFAT. In one aspect the NFAT is NFATc1, NFATc3 or NFATc2. Cytokines IL-7 and IL-15 are known to promote T cell persistence. In one aspect of the invention an immune cell described above is administered to a patient for the treatment or prevention of cancer. In one aspect of the invention, the cancer is a MUC1 positive cancer or a MUC1* positive cancer.

[0378] In another aspect, the invention is directed to a composition that includes at least two different plasmids transfected into the same immune cell, wherein the first encodes a CAR comprising an antibody fragment, scFv or peptide that binds to the extra cellular domain of an antigen on the surface of a B cell and the other encodes a gene that is not a CAR, wherein the gene that is not a CAR is expressed from an inducible promoter that is activated by elements of an activated immune cell. In one aspect, the immune cell is a T cell or an NK cell. In one aspect the CAR comprises an antibody fragment, scFv or peptide that binds to CD19. In one aspect the CAR comprises sequences derived from SEQ ID NO:830-831. In another aspect the antibody fragment, scFv or peptide binds to a surface antigen of a B cell or a B cell prescursor, or binds to CD19, CD20, CD22, BCMA, CD30, CD138, CD123, CD33 or LeY antigen. In one aspect the non-CAR species is a cleavage enzyme. In another aspect the non-CAR species is a cytokine. In one aspect, the Cytokine is IL-7. In one aspect the cytokine is IL-15. In another aspect the cytokine is IL-7 and IL-15. In one case expression of the non-CAR species is induced by elements of an activated immune cell. In one aspect the element of an activated immune cell is an NFAT. In one aspect the NFAT is NFATc1, NFATc3 or NFATc2. that is not a CAR, wherein the gene that is not a CAR is expressed from an inducible promoter wherein expression is induced by elements of an activated immune cell. In one aspect the immune cell transfected or transduced with the composition is administered to a patient for the treatment or prevention of cancer. In one case the cancer is a leukemia, lymphoma or blood cancer.

[0379] It is not intended for the invention to be limited by a specific method or technology for inserting the gene or plasmid comprising a sequence encoding a CAR or activated T cell inducible protein or peptide there encoded. For example, the gene encoding the CARs and activated T cell induced genes described herein can be virally transduced into an immune cell using viruses, which may or may not result in the CAR gene being integrated into the genome of the recipient cell. Virus delivery systems and viral vectors include but are not limited to retroviruses, including gamma-retroviruses, lentivirus, adenoviruses, adeno-associated viruses, baculoviruses, poxvirus, herpes simplex viruses, oncolytic viruses, HF10, T-Vec and the like. In addition to viral transduction, CARs and activated T cell induced genes described herein can be directly spliced into the genome of the recipient cell using methods such as CRISPR technology, CRISPR-Cas9 and -CPF1, TALEN, Sleeping Beauty transposon system, and SB 100×.

[0380] Bulky cell surface proteins such as MUC1-FL can also cause a steric hindrance problem for BiTEs. A BiTE is a two-headed bi-specific antibody wherein one head binds to a T cell and the other head binds to a tumor-associated antigen. In this way, the BiTE links together the T cell and the tumor cells. The antibody that binds to the T cell should be an antibody that activates the T cell, such as an antibody against CD3 such as OKT3 scFv (SEQ ID NO:687) or CD28. To solve the steric hindrance problem, the linker between the T cell specific antibody and the tumor specific antibody is lengthened. Examples of BiTEs with extended linkers Anti-CD3-linker-anti-MUC1*, are shown as SEQ ID NOS:689, 691, 693, 695, 697, and 699.

[0381] In another aspect of the invention, an anti-MUC1* single chain molecule is fused to a cleavage enzyme or a catalytically active fragment of a cleavage enzyme. In one aspect of the invention, the cleavage enzyme is MMP9 (SEQ ID NO:701). In another aspect of the invention, the enzyme is a catalytically active fragment of MMP9 (SEQ ID NO:703). In some cases, the antibody fragment of the CAR is chosen for its ability to recognize MUC1* when cleaved by that specific cleavage enzyme. In one embodiment, the cleavage enzyme is MMP9, MMP3, MMP14, MMP2, ADAM17, ADAM TS16, and/or ADAM28. In one embodiment, the antibody or antibody fragment binds to a peptide having the sequence of SEQ ID NO:2 (PSMGFR) GTINVHDVETQFNQYKTEAASRYNLTISDVSVSDVPFPFSAQSGA, PSMGFR N-10, QFNQYKTEAASRYNLTISDVSVSDVPFPFSAQSGA, or PSMGFR N+18 SNIKFRPGSVVVQLTLAFREGTINVHDVETQFNQYKTEAASRYNLTISDVSVSDVPFPFSAQS GA. “PSMGFR N+18” refers to a fragment of MUC1 receptor in which 18 amino acid residues have been added at the N-terminal end of PSMGFR segment within the MUC1 receptor of SEQ ID NO: 1. In another embodiment, cleavage enzymes MMP9 and MMP3 are transduced into a T cell that is also transduced with a CAR with an antibody fragment that is a fragment of MNC2.

[0382] Methods Used in Carrying Out Experimentation in Relation to the Present Invention

[0383] 1. Lentivirus Production and Viral Transduction of Immune Cells

[0384] HEK293 or HEK293T cells (ATCC) were used to produce lentivirus. The day prior transfection plates (6 well plate) were coated with poly-D-lysine and cells seeded so that cell density reaches 90-95% at the time of transfection and cultures in a 5% CO2 atmosphere. The next day cells were transfected with Lipofectamine 3000 (life technologies) and Opti-MEM® I Reduced Serum Medium according to the manufacturer instructions (0.75 ug of lentiviral expression vector and 2.25 ug of pPACKH1 packaging mix was used). After 6 h incubation, the media was changed and media containing lentivirus was harvested after 24 and 48 hours. Lentivirus was concentrated with Lenti-X concentrator (Clontech) and titer was calculated using the Lenti-X p@4 Rapid Titer Kit (Clontech). Lentivirus was store at −80 C in single-use aliquots.

[0385] Transduction of Immune Cells with Constructs Including CARs

[0386] Human T cells, if frozen, were thawed and pre-warmed in 100-200 units IL-2 and TexMACS medium, 20 ml, and pelleted by centrifugation. Cells were resuspended in 10 ml of medium and cultured at 37° C., 5% C02 at 1×10⁶ cells/ml in complete medium with anti-CD3/anti-CD28 beads (TransAct kit).

[0387] After 4 days in culture, cells were counted and 450 ul of cell suspension was placed in single well of a 24-well plate at a density of approximately 1×10⁶ cells/ml. Cells were allowed to settle. 150 ul was carefully removed from the top of each well. To each well was added an appropriate dilution of lentiviral vector, diluted in plain TexMACS medium, along with protamine sulfate to a final concentration of 10 ug/ml, in a 150 ul volume, for a final total volume of 450 ul per well and incubated for 24 hrs. Transduced cells were removed, pelleted by centrifugation, and resuspended in fresh medium, adjusting cell density, not to exceed 1.0×10⁶ cells/ml. Transduced T cells can be expanded and frozen or used directly. Typically transduced T cells are used or frozen between Day 7 and Day 20 post activation with IL-2 and TransAct media.

[0388] 2. Comparing CAR T Cell Activity Among Several Anti-MUC1* CARs

[0389] Human T cells (ALLCELLS) were transduced with anti-MUC1* CAR18, CAR19, CAR44, CAR49, CAR44 and CAR49 or CAR50. The CAR constructs all had a GFP marker so that CAR T cells are green and untransduced T cells (FIG. 80A) are clear. CAR18 is huMNE6scFv-Fc-CD8-41BB-3z. CAR19 is the same except instead of a portion of an Fc region for the linker between scFv and transmembrane region, CAR19 has an Fc region with the hinge portion mutated out. CAR44 is huMNC2-scFv-CD8-CD8 (transmembrane-41BB-3z). CAR49 is the same as CAR44 except that CAR44 has a CD8 leader sequence and CAR49 has an IgK leader sequence. CAR50 is the same as CAR44 except that CAR50 has a murine MNC2-scFv and a CD4 transmembrane domain. Table 1 gives details of each CAR construct. The CAR T cells were then incubated for 18 hours with HCT-MUC1* cancer cells that had been stably transfected with mCherry (red). When T cells recognize a target cell, they cluster the target cells and begin to kill them. As can be seen in FIGS. 80A-80F the green CAR T cells are effectively clustering and killing the target MUC1* positive cancer cells.

[0390] 3. Confocal Imaging of CAR T Cells Giving the “Kiss of Death” to MUC1* Positive Cancer Cells.

[0391] Human T cells that were transduced with CAR44 were co-cultured for 24 hours with MUC1* positive cancer cells that were stably transfected with GFP (green). All of the cells were stained with DAPI (blue). Granzyme B was stained with a fluorophore. After T cell activation, they express perforin that is thought to make a hole in the target cancer cells. The T cell then injects the cancer cell with granzyme B (yellow) which then induces apoptotic pathways, resulting in cancer cell lysis. FIGS. 81A-81D show photographs of human huMNC2-CAR44 T cells injecting granzyme B (yellow) into MUC1* positive and GFP positive (green) DU145 prostate cancer cells. FIG. 81A is a 4× magnified photograph. FIG. 81B is a 20× magnified photograph. FIG. 81C is a 20× magnified photograph. FIG. 81D is a 40× magnified photograph.

[0392] 5. Analysis of CAR T Cell Induced Killing of MUC1* Positive Cancer Cells by FACS Analysis

[0393] FIGS. 82A-82B show the killing effect of huMNC2-CAR44 T cells on T47D MUC1* positive breast cancer cells, wherein the breast cancer cells have been transfected with increasing amounts of additional MUC1*. As can be seen, the killing effect of the huMNC2-CAR44 T cells increases as the amount of target MUC1* expressed on the cells increases. FIG. 82A is a graph of target cell killing as measured by FACS. FIG. 82B is a graph of an ELISA assay in which the supernatant from the huMNC2-CAR44 T cells in co-culture with the T47D cells is probed for the presence of secreted interferon gamma, which is a sign of T cell activation.

[0394] There are many methods for analyzing cytotoxicity by FACS. In this example, human T cells were isolated from whole blood according to standard protocols. The T cells were then separately transduced twice with lenti virus bearing the CAR constructs, wherein the CAR constructs bear a GFP tag. Following 2-3 days of culture in RPMI 10% FBS and IL-2, the cells were stained with F(ab′)2 to label surface expression of MN-E6, MN-C2, MN-C3 and MN-C8. Cells were then sorted by flow cytometry for Fab-positive, GFP-positive cells. That means that the double positive population had a CAR inserted and that the CAR exposed the correct antibody fragment. The CAR T cells were then ready to be mixed with the MUC1* negative control cells or the target MUC1* positive cancer cells.

[0395] The target cells were prepared as follows: Harvest target cells and resuspend cells in serum-free medium containing 15 uM of CMTMr dye (Cell Tracker Orange, 5-and-6-4-chloromethyl benzoyl amino tetramethylrhodamine, Thermo Fisher) at 1-1.5×10⁶ cells/mL. Incubate 30 min under growth conditions appropriate to particular cell type. Wash in culture media and transfer stained cells to a new tube and incubate the cells 60 min in media. Wash 2 more times in culture media to get rid of all excess dye. Set up the assay in 24 well plates with 0.5 ml media total volume. Resuspend the target cells (and control target cells) so that there are always 20,000 cells per well (20,000 cells/250 ul). Plate 250 ul in each well. Add 250 ul of the T cells so that the ratio of T cell: target cells=20:1, 10:1, 5:1 or 1:1. Analyse cells after 24 h and 72 h. For suspension target cells, take off the 0.5 ml media from the well and place in tube, wash the well with 0.5 ml media or PBS. For adherent target cells, take off the 0.5 ml media from the well and place in tube, wash the well with 0.5 ml PBS. Add the PBS to the same tube and add 120 ul trypsin to the well. Incubate for 4 min then add 0.5 ml media to neutralize trypsin and place that in the tube as well. Spin cells and resuspend pellet in 100 ul FACS buffer. Spin cells again. Resuspend cells in 100 ul buffer+5 ul anti-CD3 antibody, for 30 min on ice (to stain T cells). After 30 min, wash stained cells 2× with FACS buffer and resuspend in 250 ul buffer. Run the cells through the filter cap of the FACS tube. 10 min prior to analysis, add 10 ul 7AAD dye to each tube and analyze with Fortessa under the Cytotoxicity template. FIGS. 83A-83D show the results of FACS analysis of huMNC2-CAR44 T cells after 24 hours of co-culture with MUC1* positive cancer cells. FIG. 83A is a graph of FACS data showing the percentage of T47D cancer cells that were killed by huMNC2-CAR44 T cells (blue bars), compared to untransduced T cells (red bars). The X-axis shows the ratio of T cells to cancer cells. FIG. 83B is a graph of FACS data showing the percentage of K562-MUC1* cancer cells that were killed by huMNC2-CAR44 T cells (blue bars), compared to untransduced T cells (red bars). FIG. 83C shows the FACS scans wherein the T47D breast cancer cells were stained with the dye CMTMR. Sytox blue is a dead cell stain. Dead cancer cells are those in quadrants 2 and 3. FIG. 83D shows the FACS scans wherein the K562-MUC1* cancer cells were stained with the dye CMTMR. Sytox blue is a dead cell stain. Dead cancer cells are those in quadrants 2 and 3.

[0396] IFN-γ secretion in media was measured using a human IFN-γ ELISA kit (Biolegend). Plates were coated with an anti-IFN-γ antibody (capture antibody, 1× in coating buffer). After overnight incubation at 4° C., the plate was washed 4 times with PBS-T and blocking solution was added to block remaining binding site on the well. After 1 h at RT (shaking at 500 rpm) the plate was washed 4 times with PBS-T and conditioned media (CM) and IFN-γ standard, was added. After 2 h at RT with shaking, the plate was washed 4 times with PBS-T and detection antibody (1×), was added. After 1 h at RT with shaking, the plate was washed 4 times with PBS-T and Avidin-HRP (1×) was added. After 30 min at RT with shaking, the plate was washed 5 times with PBS-T (soak 1 min each wash) and TMB substrate solution was added. The reaction was stopped after 20 min by adding the stop solution and absorbance was read at 450 nm (minus absorbance at 570 nm) within 15 min of stopping.

[0397] 6. Analysis of CAR T Cell Induced Killing of MUC1* Positive Cancer Cells by xCELLigence

[0398] In addition to FACS analysis, many researchers now use an xCELLigence instrument to measure CAR T killing of cancer cells. The xCELLigence instrument uses electrode arrays upon which cancer cells are plated. The adherent cancer cells insulate the electrode and so cause an increase in impedance as they grow. Conversely, T cells are not adherent and remain in suspension so do not contribute to insulation of the electrode which would increase impedance. However, if the T cells or CAR T cells kill the cancer cells on the electrode plate, the cancer cells ball up and float off as they die, which causes the impedance to decrease. The xCELLigence instrument measures impedance as a function of time, which is correlated to cancer cell killing. In addition, the electrode plates also have a viewing window. When CAR T cells effectively kill the adsorbed target cancer cells, there is a decrease in impedance but also one can see that there are no cancer cells left on the plate surface.

[0399] In most of the XCELLigence experiments, 5,000 cancer cells were plated per well of a 96-well electrode array plate. Cells were allowed to adhere and grow for 24 hours. CAR T cells were then added at an Effector to Target ratio (E:T) of 0.5:1, 1:1, 2:1, 5:1, 10:1 and sometimes 20:1. The E:T ratio assumes 100% transduction of the CAR into the T cells, when the actual transduction efficiency is 40%.

[0400] The xCELLigence instrument records impedance as a function of time and experiments can go on for up to 7 days.

[0401] FIG. 78, FIG. 79, FIG. 84H, FIG. 85H, FIGS. 86A-86C, FIGS. 89A-89C, FIGS. 90A-90D, and FIGS. 107A-107B all show results of CAR T and cancer cell experiments performed on an xCELLigence instrument.

[0402] 7. Anti-MUC1* CAR T Cell Therapy in Mice Bearing Human Tumors

[0403] Female NOD/SCID/GAMMA (NSG) mice between 8-12 weeks of age were implanted with 500,000 human cancer cells, wherein the cancer cells had previously been stably transfected with Luciferase. Mice bearing Luciferase positive cells can be injected with the enzyme's substrate Luciferin just prior to imaging, which makes the cancer cells fluoresce. The cancer cells are imaged in live mice within 10-15 minutes after injection with Luciferin on an IVIS instrument. The readout is flux or photons per second. Tumors were allowed to engraft until tumors were clearly visible by IVIS.

[0404] FIGS. 91A-91Y show fluorescent photographs of mice taken on an IVIS instrument. NSG (NOD/SCID/GAMMA) immune compromised mice that on Day 0 were subcutaneously implanted on the flank with 500,000 human MUC1* positive cancer cells that had been stably transfected with Luciferase. Tumors were allowed to engraft. On Day 5 after IVIS measurement and on Day 12, animals were injected with 10 million of either human T cells transduced with huMNC2-scFv-CAR44, untransduced T cells or PBS. 5 million T cells were injected intra-tumor and 5 million T cells were injected into the tail vein. 10 minutes prior to IVIS photographs, mice were injected intraperitoneally (IP) with Luciferin, which fluoresces after cleavage by Luciferase, thus making tumor cells fluoresce.

[0405] FIGS. 92A-92J show fluorescent photographs of mice taken on an IVIS instrument. NSG (NOD/SCID/GAMMA) immune compromised mice that on Day 0 were subcutaneously injected into the flank with 500K human BT-20 cells which are a MUC1* positive triple negative breast cancer cell line. The cancer cells had been stably transfected with Luciferase. Tumors were allowed to engraft. On Day 6 after IVIS measurement, animals were given a one-time injection of 10 million of either human T cells transduced with huMNC2-scFv-CAR44 or untransduced T cells. 5 million T cells were injected intra-tumor and 5 million were injected into the tail vein. 10 minutes prior to IVIS photographs, mice were IP injected with Luciferin.

[0406] FIGS. 93A-93H show fluorescent photographs of mice taken on an IVIS instrument. NSG (NOD/SCID/GAMMA) immune compromised mice that on Day 0 were injected into the intraperitoneal cavity (IP) with 500K human SKOV-3 cells which are a MUC1* positive ovarian cancer cell line. The cancer cells had been stably transfected with Luciferase. Tumors were allowed to engraft. On Day 3 after IVIS measurement, animals were IP injected with 10M either human T cells transduced with huMNC2-scFv-CAR44, untransduced T cells or PBS. Animals were IVIS imaged again on Day 7. 10 minutes prior to IVIS photographs, mice were IP injected with Luciferin.

[0407] 8. Confocal Analysis of MMP9 Treated Cells

[0408] HCT-MUC1-41TR also known as HCT-MUC1-18 cells that stably express MUC1 full length were seeded in 6 channel u-slide VI 0.4 (Ibidi, WI) in DMEM+10% FCS. 48 h later, cells were washed with 120 uL of PBS pH 7.4 and MMP9 catalytic domain (Enzo Life Sciences, NY), diluted in serum free medium (DMEM), was added at different concentrations (40 uL at 0, 12.5, 25, 50 and 100 ng/mL). After 1 h at 37° C. in a CO2 incubator, cells were washed twice with 120 uL of cold PBS pH 7.4 and fixed for 8 min in 4% PFA (30 uL). Cells were washed 3 times with cold PBS pH 7.4 and blocked with a 5% BSA solution in PBS pH 7.4 (40 uL) for 30 min at 4° C. (with shaking). After washing cells with cold PBS pH 7.4 (1×), cells were incubated overnight at 4° C. (with shaking) with 125 ug/mL of MNC2 diluted in PBS pH 7.4 (100 uL). Next day, cells were washed 3× with 120 uL of PBS pH 7.4 and incubated 2 h at 4° C. (with shaking) with goat anti-mouse IgG PE (Biolegend, CA) diluted in PBS pH 7.4 (100 uL, 1:200). After incubation, cells were washed 1× with 120 uL of PBS pH 7.4 and 2× with 120 uL of PBS pH 7.4+2.5 uM Hoechst 33342. Finally, cells were mounted with Ibidi mounting media (Ibidi, WI). Results show that addition of MMP9 induced cleavage of full-length MUC1 to a MUC1* form that was recognized by anti-MUC1* monoclonal antibody MNC2 (FIG. 96A-96E). This shows that MMP9 cleaves MUC1 at a site that is recognized by MNC2.

[0409] 9. NFAT-Induced MMP9 Catalytic Domain Expression

[0410] Vectors containing either 4 repeats of a NFAT response element or the NFATc1 promoter followed by the MMP9 catalytic domain were transiently transfected into HEK293TN cells (System Biosciences, CA) with Lipofectamine 3000 (ThermoFisher Scientific, MA) according the manufacturer manual. After 24-30 h, media was changed to DMEM+1% FBS+10 ng/mL PMA (Cayman Chemical, MI) and lonomycin (1-6 uM, Cayman Chemical, MI). Media and cells were collected after 18 h incubation for analysis.

[0411] Expression and secretion of MMP9 was confirmed by Western blot analysis of the cell lysates and conditioned media according to the following protocols. Cells were lysed for 20 min on ice with lysis buffer (50 mM Tris, 150 mM NaCl and 1% Triton X100). For Western blot, 100 ug of protein were separated by gel electrophoresis (4-15% Mini-PROTEAN® TGX™ Precast Protein Gels, BioRad, CA) followed by transfer to PVDF membrane (BioRad, CA). The membrane was briefly rinsed with PBS-T and then blocked for 1 h at room temperature with a solution of 3% non-fat milk (BioRad, CA). For Flag tagged protein, the membrane was quickly washed and incubated with a rabbit anti-DYKDDDDK epitope Tag antibody (Biolegend, CA) was diluted in 1% non-fat milk (1:2000) for 2 h at room temperature. For His tagged protein, the membrane was quickly washed and incubated with a rabbit anti-6× His tag antibody HRP (Abcam, MA) diluted in 1% non-fat milk (1:10000) for 1 h at room temperature. For Flag tagged protein, the membrane was then washed 3 times for 10 min with PBS-T and incubated with goat anti-Rabbit HRP antibody diluted in 1% non-fat milk (1:2500) for 1 h at room temperature. For His tagged protein and after the secondary antibody incubation for the Flag tagged protein, the membrane was processed after being washed 3 times for 10 min with PBS-T using Clarity™ Western ECL Substrate (BioRad, CA).

[0412] In some cases, the protein was first immunoprecipitated before analysis. Flag tagged MMP9 catalytic domain was immunoprecipitated from conditioned media (˜2 mL) using an anti-DYKDDDDK Tag (L5) affinity gel (Biolegend, CA) according to manufacturer manual. Pull down proteins were used for Western blot analysis or cleavage assay.

[0413] FIGS. 98A-98F are photographs of Western blots of cell lysates probed with an antibody that recognizes the MMP9 construct that was transfected. A plasmid was constructed then transfected into HEK293T cells, wherein the gene for MMP9 catalytic domain was inserted downstream of either 3 or 4 NFAT response elements. The NFAT pathway was activated by the addition of PMA at 10 ng/mL and lonomycin at either 1 uM or 2 uM, except in control (ctl) cells. Pulldown was done using beads to which were coupled an antibody that recognizes a Flag tag that was incorporated at the C-terminus of the MMP9 construct. Lane 1 shows a molecular weight control. Lanes 2, 3, 4 and 5 show MMP9 that was eluted from the anti-Flag tag beads. Lanes 2 and 3 were first elutions and the cells shown in Lanes 4 and 5 were second elutions. Into Lanes 2 and 4 were loaded conditioned media from cells in which the NFAT pathway had been activated with PMA 10 ng/mL and lonomycin at 1 uM. Into Lanes 3 and 5 were loaded conditioned media from cells in which the NFAT pathway had been activated with PMA 10 ng/mL and lonomycin at 2 uM.

[0414] FIGS. 100A-100E show NFAT-induced MMP9 catalytic domain expressed in HEK293T cells wherein the native leader sequence of MMP9 has been replaced by an IgK leader sequence and MMP9 catalytic domain is downstream of 4 repeats of an NFAT response element. FIG. 100A shows photograph of Western blot detecting expression of MMP9 in the cell lysate after activation of the NFAT pathway. FIG. 100B shows photograph of Western blot detecting expression of MMP9 in the conditioned media after activation of the NFAT pathway.

[0415] FIGS. 101A-101E show MMP9 can be expressed with different leader sequences and also show subsequent activity of each. FIG. 101A shows a Western blot detecting an MMP9 protein in cell lysate wherein the leader sequence upstream of the MMP9 gene is either its native sequence or an IgK sequence. FIG. 101B shows a Western blot detecting MMP9 in conditioned media wherein the leader sequence upstream of the MMP9 gene is its native sequence or an IgK.

[0416] FIGS. 102A-102D show three (3) clones 4, 6 and 7 of cells transfected with a plasmid that produces an NFAT inducible MMP9 wherein the NFATc1 promoter sequence is upstream of the MMP9 gene, which in this case is a truncated MMP9 comprising its catalytic domain. Also shown for comparison is a cell transfected with a plasmid that produces an NFAT inducible MMP9 wherein 4 repeats of an NFAT response element sequence are upstream of an MMP9 gene. FIG. 102A shows a Western blot detecting an MMP9 protein in cell lysate. FIG. 102B shows a Western blot detecting MMP9 in the conditioned media.

[0417] FIGS. 105A-105E show photographs of Western blots of human T cells transduced with either CAR44 alone, NFAT-inducible MMP9 alone or transduced with both CAR44 and NFAT-inducible MMP9, wherein the resultant T cells are either not activated, chemically activated by PMA/Ionomycin, activated by co-culturing with beads presenting synthetic MUC1* peptide or co-culturing with MUC1* positive cancer cells. Western blot was probed with an anti-Flag tag also known as DYK tag antibody. Catalytic domain of MMP9 runs with an apparent molecular weight of about 40 kDa. FIGS. 105A-105D show photographs of Western blots of cleared cell lysates. Results show that T cells transduced with NFAT-inducible MMP9 only express MMP9 when they are activated by PMA/Ionomycin, MUC1* beads or MUC1* positive cancer cells. T cells transduced with both CAR44 and NFAT-inducible MMP9 only express MMP9 when the T cells are activated by stimulation with MUC1* beads or with MUC1* positive cancer cells.

[0418] Results show that T cells transduced with NFAT-inducible MMP9 express MMP9 when they are activated. T cells transduced with both CAR44 and NFAT-inducible MMP9 are specifically activated when they are co-cultured with beads or cells presenting or expressing MUC1* (FIG. 105A Lane 5 and Lane 6).

[0419] 10. Fluorogenic MMP Peptide Substrate Cleavage Assay

[0420] OMNIMMP fluorogenic substrate (Enzo life sciences, NY) was diluted to 20 uM in assay buffer (50 mM Tris pH 7.5, 300 mM NaCl, 1 mM CaCl2, 5 uM Zncl2, 0.1% Brj-35 and 15% glycerol) and kept on ice and protected from light until used. Peptide can also be diluted in PBS pH 7.4 or culture medium. Cell lysate was diluted to 0.4 mg/mL is assay buffer (or PBS pH 7.4 or culture medium). For the assay, 50 uL of recombinant MMP9 catalytic domain (1-2 ug/mL in assay buffer, PBS pH 7.4 or culture medium), 50 uL of diluted cell lysate, 50 uL of conditioned media or 50 uL of pulled down protein was added to wells of a 96 well plate compatible with fluorometer. Just before starting the assay, 50 uL of diluted peptide was added to each well and quickly mixed (final peptide concentration is 10 uM). Fluorescence was recorded every 10 min for about 6 h at 37° C. (Ex.: 328 nm, Em.: 393 nm).

[0421] FIG. 97 shows a graph of a fluorogenic peptide substrate of MMP9, the OMNIMMP peptide, being cleaved by MMP9 catalytic domain at two concentrations in either PBS, solid trace, or cell culture media, dashed trace.

[0422] FIGS. 99A-99C show graphs of a fluorogenic peptide, OMNIMMP peptide, substrate of MMP9 being cleaved by the cell lysate or conditioned media of HEK293T cells that were transfected with a plasmid containing an MMP9 gene downstream from 4 repeats of an NFAT response element. The MMP9 peptide substrate assay shows that activation of the NFAT pathway by PMA/ionomycin caused an MMP9 to be expressed and secreted and that it was active as evidenced by its ability to cleave a peptide substrate.

[0423] FIG. 100C shows graph of MMP9 fluorogenic peptide substrate, OMNIMMP peptide, cleavage by MMP9 catalytic domain expressed and secreted in conditioned media of HEK293T cells wherein the native leader sequence of MMP9 has been replaced by an IgK leader sequence and MMP9 catalytic domain is downstream of 4 repeats of an NFAT response element. FIG. 100D shows graph of MMP9 fluorogenic peptide substrate cleavage by MMP9 catalytic domain expressed and secreted in conditioned media of HEK293T cells wherein the native leader sequence of MMP9 has been replaced by an IgK leader sequence and MMP9 catalytic domain is downstream of 4 repeats of an NFAT response element.

[0424] FIG. 101C shows a graph of an MMP9 peptide substrate cleaved by the expressed MMP9.

[0425] FIGS. 103A-103D show graphs of an MMP9 peptide substrate cleavage assay. FIG. 103A shows the cleavage activity of MMP9 from the lysate of cells transfected with a plasmid having MMP9 expression driven from the NFATc1 promoter or from 4 repeats of an NFAT response element. FIG. 103B shows the cleavage activity of MMP9 from the conditioned media of cells transfected with a plasmid having MMP9 expression driven from the NFATc1 promoter or off of 4 repeats of an NFAT response element.

[0426] FIGS. 104A-104B show the results of the OMNIMMP9 fluorogenic substrate assay that measures activity of MMP9. Conditioned media from human T cells transduced with NFAT-inducible MMP9 alone or in combination with CAR44 were added to the assay and MMP9 substrate cleavage was measured as a function of time. FIG. 104A shows MMP9 activity when human T cells were transduced with both CAR44 and an NFAT-inducible MMP9 after the cells were activated by co-culturing with HCT-MUC1* cancer cells. The trace that does not show increased substrate cleavage as a function of time is the conditioned media from cells that were not activated. FIG. 104B shows MMP9 activity when human T cells were transduced with just an NFAT-inducible MMP9 after the cells were activated by co-culturing with beads coated with anti-CD3 and anti-CD28 which are known to activate T cells. The trace that does not show increased substrate cleavage as a function of time is the conditioned media from cells that were not activated.

[0427] 11. Cloning

[0428] MMP9 Catalytic Domain Cloning in Lentivector Downstream of NFAT Response Elements:

[0429] Two sequences were synthesized (pNFAT-MMP9cat-1 and pNFAT-MMP9cat-2, (SEQ ID NO:784 and SEQ ID NO:785). The lentivector pGreenFire1-4×NFAT (System Biosciences, CA) was digested with SpeI and KpnI restriction enzymes (New England Biolabs). The purified fragment and the 2 synthesized sequences were assembled using the Gibson assembly cloning kit (New England Biolab). The resulting constructs (pGreenFire1-4×NFAT-MMP9cat) contains 4 repeats of a NFAT response element followed by a minimum promoter (mCMV) and the MMP9 catalytic domain with its native leader sequence.

[0430] Cloning of NFAT Response Element in pGL4-14[Luc2/Hygro]:

[0431] The 4×NFAT domain was amplified from the lentivector pGreenFire1-4×NFAT by polymerase chain reaction (PCR) using the following primer: 5′-tagatggtaccaagaggaaaatttgtttcatacag-3′ (SEQ ID NO: 786) and 5′-tagataagcttgctggatcggtcccggtgtc-3′ (SEQ ID NO: 787). After digestion with KpnI and HindIII restriction enzymes (New England Biolabs), the purified fragment was cloned into the promoter-less vector pGL4-14[luc2/Hygro](Promega) digested with the same restriction enzymes to create the construct pGL4-14-4×NFAT.

[0432] Cloning of MMP9 Catalytic Domain into pGL4-14-4×NFAT:

[0433] A fragment containing a minimum promoter (mCMV) followed by MMP9 native leader sequence and MMP9 catalytic domain was amplified from the lentivector pGreenFire1-4×NFAT-MMP9cat by polymerase chain reaction (PCR) using the following primer: 5′-tcatacagaaggcgttactagttaggcgtgtacggtgg-3′ (SEQ ID NO:788) and 5′-acagtaccggattgccaagcttttatcacttatcgtcgtcatccttg-3′ (SEQ ID NO:789). pGL4-14-4×NFAT was digested with SpeI and HindIII restriction enzymes (New England Biolabs). The purified PCR fragment and digested pGL4-14-4×NFAT were assembled using the Gibson assembly cloning kit (New England Biolab) to create the construct pGL4-14-4×NFAT-MMP9cat.

[0434] Cloning of MMP9 Catalytic Domain into pSECTag2:

[0435] MMP9 catalytic domain without its native leader sequence was amplified from the lentivector pGreenFire1-4×NFAT-MMP9cat by polymerase chain reaction (PCR) using the following primer: 5′-aagttggtaccgttccaaacctttgagggcgacc-3′ (SEQ ID NO:790) and 5′-aagttctcgagcaggttcagggcgaggaccatag-3′ (SEQ ID NO:791). After digestion with KpnI and XhoI restriction enzymes (New England Biolabs), the purified fragment was cloned into the vector pSECTag2 A (ThermoFisher Scientific) digested with the same restriction enzymes to create the construct pSECTag2 MMP9 cat His. In this construct MMP9 catalytic domain will downstream if the IgK leader sequence.

[0436] Cloning of MMP9 Catalytic Domain with IgK Leader Sequence into pGL4-14-4×NFAT:

[0437] MMP9 catalytic domain with its native leader sequence was amplified from the pGL4-14-4×NFAT-MMP9cat by polymerase chain reaction (PCR) using the following primer: 5′-attgactcgagctctcgacattcgtttctagagc-3′ (SEQ ID NO:792) and 5′-attgaaagcttttatcacttatcgtcgtcatccttg-3′ (SEQ ID NO:793). After digestion with XhoI and HindIII restriction enzymes (New England Biolabs), the purified fragment was cloned into the vector pGL4-14[luc2/Hygro] (Promega) digested with the same restriction enzymes to create the construct pGL4-14 MMP9cat XH.

[0438] A fragment containing 4×NFAT response elements followed by the minimum promoter (mCMV) was amplified from pGL4-14-4×NFAT-MMP9cat by polymerase chain reaction (PCR) using the following primer: 5′-tagcaaaataggctgtccc-3′ (SEQ ID NO:794) and 5′-attgactcgaggctggatcggtcccggtgtc-3′ (SEQ ID NO:795). After digestion with KpnI and XhoI restriction enzymes (New England Biolabs), the purified fragment was cloned into the vector pGL4-14 MMP9cat XH digested with the same restriction enzymes to create the construct pGL4-14 4×NFAT-MMP9cat KXH

[0439] A fragment containing the IgK leader sequence followed by MMP9 catalytic domain was amplified from pSECTag2 MMP9 cat by polymerase chain reaction (PCR) using the following primer: 5′-aagacaccgggaccgatccagcctcgagagacccaagctggctagccacc-3′ (SEQ ID NO:796) and 5′-ttaccaacagtaccggattgccaagcttttatcacttatcgtcgtcatcc-3′ (SEQ ID NO:797). pGL4-14 4×NFAT-MMP9cat KXH was digested with XhoI and HindIII restriction enzymes (New England Biolabs). The purified PCR fragment and digested pGL4-14 4×NFAT-MMP9cat KXH were assembled using the Gibson assembly cloning kit (New England Biolab) to create the construct pGL4-14-4×NFAT-IgK MMP9cat.

[0440] Cloning of MMP9 Catalytic Domain into pEZX-PG02.1 Downstream of NFATc1 Promoter:

[0441] MMP9 catalytic domain with its native leader sequence was amplified from the lentivector pGreenFire1-4×NFAT-MMP9cat by polymerase chain reaction (PCR) using the following primer: 5′-attgaaagcttctctcgacattcgtttctagagc-3′ (SEQ ID NO:798) and 5′-attgagagctcttatcacttatcgtcgtcatc-3′ (SEQ ID NO:799). After digestion with HindIII and SacI restriction enzymes (New England Biolabs), the purified fragment was cloned into the vector pEZX-PG02.1 downstream of the NFACTc1 promoter (GeneCopoeia, MD) to create the construct pEZX-NFATc 1-MMP9cat.

[0442] Modification of pEZX-NFATc1-MMP9cat:

[0443] pEZX-NFATc1-MMP9cat was modified to introduce SpeI and KpnI restriction site 5′ of the NFATc1 promoter and NheI and EcoRV restriction site 3′ of MMP9 catalytic domain. Two gBLOCKs were synthesized by our request by IDT, IA. (NFAT modif 1 and NFAT modif 2, SEQ ID NO:800 and SEQ ID NO:801). The pEZX-NFATc1-MMP9cat vector was digested with NheI, EcoRI, SacI and XhoI restriction enzymes (New England Biolabs). Two fragments were purified and assembled with the two synthesized gBLOCKS using the Gibson assembly cloning kit (New England Biolab).

[0444] Cloning of NFATc1 Promoter/MMP9 Catalytic Domain into Lentivector pCDH-CMV-MCS-EF1α-Hygro:

[0445] Modified pEZX-NFATc1-MMP9cat vector was digested with SpeI and NheI restriction enzymes (New England Biolabs) and the fragment containing NFATc1 promoter followed by MMP9 catalytic domain was purified and cloned into the lentivector pCDH-CMV-MCS-EF1α-Hygro (System Biosciences) digested with the same restriction enzymes.

[0446] Cloning of NFAT Response Element/MMP9 Catalytic Domain into Lentivector pCDH-CMV-MCS-EF1α-Hygro:

[0447] A fragment containing 4 repeats of a NFAT response element followed by MMP9 catalytic domain with its native leader sequence was amplified from the vector pGL4-14-4×NFAT-MMP9cat by polymerase chain reaction (PCR) using the following primer: 5′-acaaaattcaaaattttatcgatactagttggcctaactggccggtaccaag-3′ (SEQ ID NO:802) and 5′-atccgatttaaattcgaattcgctagcttatcacttatcgtcgtcatcc-3′ (SEQ ID NO:803). The purified PCR fragment and digested pCDH-CMV-MCS-EF1α-Hygro (SpeI and NheI) were assembled using the Gibson assembly cloning kit (New England Biolab).

[0448] All of the references cited herein are incorporated by reference in their entirety.

Sequence Listing Free Text
As regards the use of nucleotide symbols other than a, g, c, t, they follow the
convention set forth in WIPO Standard ST.25, Appendix 2, Table 1, wherein k
represents t or g; n represents a, c, t or g; m represents a or c; r represents
a or g; s represents c or g; w represents a or t and y represents c or t.
MUC1 Receptor
(Mucin 1 precursor, Genbank Accession number: P15941)
(SEQ ID NO: 1)
MTPGTQSPFFLLLLLTVLTVVTGSGHASSTPGGEKETSATQRSSVPSSTEKNAVSMTSSVLSSHSPGSGSSTTQGQDVTLA
PATEPASGSAATWGQDVTSVPVTRPALGSTTPPAHDVTSAPDNKPAPGSTAPPAHGVTSAPDTRPAPGSTAPPAHGVTSAP
DTRPAPGSTAPPAHGVTSAPDTRPAPGSTAPPAHGVTSAPDTRPAPGSTAPPAHGVTSAPDTRPAPGSTAPPAHGVTSAPD
TRPAPGSTAPPAHGVTSAPDTRPAPGSTAPPAHGVTSAPDTRPAPGSTAPPAHGVTSAPDTRPAPGSTAPPAHGVTSAPDT
RPAPGSTAPPAHGVTSAPDTRPAPGSTAPPAHGVTSAPDTRPAPGSTAPPAHGVTSAPDTRPAPGSTAPPAHGVTSAPDTR
PAPGSTAPPAHGVTSAPDTRPAPGSTAPPAHGVTSAPDTRPAPGSTAPPAHGVTSAPDTRPAPGSTAPPAHGVTSAPDTRP
APGSTAPPAHGVTSAPDTRPAPGSTAPPAHGVTSAPDTRPAPGSTAPPAHGVTSAPDTRPAPGSTAPPAHGVTSAPDTRPA
PGSTAPPAHGVTSAPDTRPAPGSTAPPAHGVTSAPDTRPAPGSTAPPAHGVTSAPDTRPAPGSTAPPAHGVTSAPDTRPAP
GSTAPPAHGVTSAPDTRPAPGSTAPPAHGVTSAPDTRPAPGSTAPPAHGVTSAPDTRPAPGSTAPPAHGVTSAPDTRPAPG
STAPPAHGVTSAPDTRPAPGSTAPPAHGVTSAPDTRPAPGSTAPPAHGVTSAPDTRPAPGSTAPPAHGVTSAPDTRPAPGS
TAPPAHGVTSAPDTRPAPGSTAPPAHGVTSAPDTRPAPGSTAPPAHGVTSAPDTRPAPGSTAPPAHGVTSAPDTRPAPGST
APPAHGVTSAPDTRPAPGSTAPPAHGVTSAPDTRPAPGSTAPPAHGVTSAPDNRPALGSTAPPVHNVTSASGSASGSASTL
VHNGTSARATTTPASKSTPFSIPSHHSDTPTTLASHSTKTDASSTHHSSVPPLTSSNHSTSPQLSTGVSFFFLSFHISNLQ
FNSSLEDPSTDYYQELQRDISEMFLQIYKQGGFLGLSNIKFRPGSVVVQLTLAFREGTINVHDVETQFNQYKTEAASRYNL
TISDVSVSDVPFPFSAQSGAGVPGWGIALLVLVCVLVALAIVYLIALAVCQCRRKNYGQLDIFPARDTYHPMSEYPTYHTH
GRYVPPSSTDRSPYEKVSAGNGGSSLSYTNPAVAAASANL
PSMGFR
(SEQ ID NO: 2)
GTINVHDVETQFNQYKTEAASRYNLTISDVSVSDVPFPFSAQSGA
Human NME1
(DNA)
(SEQ ID NO: 3)
atggccaactgtgagcgtaccttcattgcgatcaaaccagatggggtccagcggggtcttgtgggagagattatcaagcg
ttttgagcagaaaggattccgccttgttggtctgaaattcatgcaagcttccgaagatcttctcaaggaacactacgttg
acctgaaggaccgtccattctttgccggcctggtgaaatacatgcactcagggccggtagttgccatggtctgggagggg
ctgaatgtggtgaagacgggccgagtcatgctcggggagaccaaccctgcagactccaagcctgggaccatccgtggaga
cttctgcatacaagttggcaggaacattatacatggcagtgattctgtggagagtgcagagaaggagatcggcttgtggt
ttcaccctgaggaactggtagattacacgagctgtgctcagaactggatctatgaatga
(amino acids)
(SEQ ID NO: 4)
MANCERTFIAIKPDGVQRGLVGEIIKRFEQKGFRLVGLKFMQASEDLLKEHYVDLKDRPFFAGLVKYMHSGPVVAMVWEG
LNVVKTGRVMLGETNPADSKPGTIRGDFCIQVGRNIIHGSDSVESAEKEIGLWFHPEELVDYTSCAQNWIYE-
Human NME7
(DNA)
(SEQ ID NO: 5)
atgaatcatagtgaaagattcgttttcattgcagagtggtatgatccaaatgcttcacttcttcgacgttatgagctttt
attttacccaggggatggatctgttgaaatgcatgatgtaaagaatcatcgcacctttttaaagcggaccaaatatgata
acctgcacttggaagatttatttataggcaacaaagtgaatgtcttttctcgacaactggtattaattgactatggggat
caatatacagctcgccagctgggcagtaggaaagaaaaaacgctagccctaattaaaccagatgcaatatcaaaggctgg
agaaataattgaaataataaacaaagctggatttactataaccaaactcaaaatgatgatgctttcaaggaaagaagcat
tggattttcatgtagatcaccagtcaagaccctttttcaatgagctgatccagtttattacaactggtcctattattgcc
atggagattttaagagatgatgctatatgtgaatggaaaagactgctgggacctgcaaactctggagtggcacgcacaga
tgcttctgaaagcattagagccctctttggaacagatggcataagaaatgcagcgcatggccctgattcttttgcttctg
cggccagagaaatggagttgttttttccttcaagtggaggttgtgggccggcaaacactgctaaatttactaattgtacc
tgttgcattgttaaaccccatgctgtcagtgaaggactgttgggaaagatcctgatggctatccgagatgcaggttttga
aatctcagctatgcagatgttcaatatggatcgggttaatgttgaggaattctatgaagtttataaaggagtagtgaccg
aatatcatgacatggtgacagaaatgtattctggcccttgtgtagcaatggagattcaacagaataatgctacaaagaca
tttcgagaattttgtggacctgctgatcctgaaattgcccggcatttacgccctggaactctcagagcaatctttggtaa
aactaagatccagaatgctgttcactgtactgatctgccagaggatggcctattagaggttcaatacttcttcaagatct
tggataattag
(amino acids)
(SEQ ID NO: 6)
MNHSERFVFIAEWYDPNASLLRRYELLFYPGDGSVEMHDVKNHRTFLKRTKYDNLHLEDLFIGNKVNVFSRQLVLIDYGD
QYTARQLGSRKEKTLALIKPDAISKAGEIIEIINKAGFTITKLKMMMLSRKEALDFHVDHQSRPFFNELIQFITTGPIIA
MEILRDDAICEWKRLLGPANSGVARTDASESIRALFGTDGIRNAAHGPDSFASAAREMELFFPSSGGCGPANTAKFTNCT
CCIVKPHAVSEGLLGKILMAIRDAGFEISAMQMFNMDRVNVEEFYEVYKGVVTEYHDMVTEMYSGPCVAMEIQQNNATKT
FREFCGPADPEIARHLRPGTLRAIFGKTKIQNAVHCTDLPEDGLLEVQYFFKILDN-
NME7 peptides
NME7A peptide 1 (A domain):
(SEQ ID NO: 7)
MLSRKEALDFHVDHQS
NME7A peptide 2 (A domain):
(SEQ ID NO: 8)
SGVARTDASES
NME7B peptide 1 (B domain):
(SEQ ID NO: 9)
DAGFEISAMQMFNMDRVNVE
NME7B peptide 2 (B domain):
(SEQ ID NO: 10)
EVYKGVVTEYHDMVTE
NME7B peptide 3 (B domain):
(SEQ ID NO: 11)
AIFGKTKIQNAVHCTDLPEDGLLEVQYFF
Mouse E6 Heavy chain variable region sequence:
(DNA)
(SEQ ID NO: 12)
gaggtgaaggtggtggagtctgggggagacttagtgaagcctggagggtccctgaaactctcctgtgtagtctctggattc
actttcagtagatatggcatgtcttgggttcgccagactccaggcaagaggctggagtgggtcgcaaccattagtggtggc
ggtacttacatctactatccagacagtgtgaaggggcgattcaccatctccagagacaatgccaagaacaccctgtacctg
caaatgagcagtctgaagtctgaggacacagccatgtatcactgtacaagggataactacggtaggaactacgactacggt
atggactactggggtcaaggaacctcagtcaccgtctcctca
(amino acids)
(SEQ ID NO: 13)
EVKVVESGGDLVKPGGSLKLSCVVSGFTFSRYGMSWVRQTPGKRLEWVATISGGGTYIYYPDSVKGRFTISRDNAKNTLYL
QMSSLKSEDTAMYHCTRDNYGRNYDYGMDYWGQGTSVTVSS
Mouse E6 heavy chain variable framework region 1 (FWR1) sequence:
(DNA)
(SEQ ID NO: 14)
gaggtgaaggtggtggagtctgggggagacttagtgaagcctggagggtccctgaaactctcctgtgtagtctct
(amino acids)
(SEQ ID NO: 15)
EVKVVESGGDLVKPGGSLKLSCVVSGFTFS
Mouse E6 heavy chain variable complementarity determining regions 1 (CDR1)
sequence:
(DNA)
(SEQ ID NO: 16)
ggattcactttcagtagatatggcatgtct
(amino acids)
(SEQ ID NO: 17)
RYGMS
Mouse E6 heavy chain variable framework region 2 (FWR2) sequence:
(DNA)
(SEQ ID NO: 18)
tgggttcgccagactccaggcaagaggctggagtgggtcgca
(amino acids)
(SEQ ID NO: 19)
WVRQTPGKRLEWVA
Mouse E6 heavy chain variable complementarity determining regions 2 (CDR2)
sequence:
(DNA)
(SEQ ID NO: 20)
accattagtggtggcggtacttacatctactatccagacagtgtgaagggg
(amino acids)
(SEQ ID NO: 21)
TISGGGTYIYYPDSVKG
Mouse E6 heavy chain variable framework region 3 (FWR3) acid sequence:
(DNA)
(SEQ ID NO: 22)
cgattcaccatctccagagacaatgccaagaacaccctgtacctgcaaatgagcagtctgaagtctgaggacacagccat
gtatcactgtacaagg
(amino acids)
(SEQ ID NO: 23)
RFTISRDNAKNTLYLQMSSLKSEDTAMYHCTR
Mouse E6 heavy chain variable complementarity determining regions 3 (CDR3)
sequence:
(DNA)
(SEQ ID NO: 24)
gataactacggtaggaactacgactacggtatggactac
(amino acids)
(SEQ ID NO: 25)
DNYGRNYDYGMDY
IGHV3-21*03 heavy chain variable region sequence:
(DNA)
(SEQ ID NO: 26)
gaggtgcagctggtggagtctgggggaggcctggtcaagcctggggggtccctgagactctcctgtgcagcctctggatt
caccttcagtagctatagcatgaactgggtccgccaggctccagggaaggggctggagtgggtctcatccattagtagta
gtagtagttacatatactacgcagactcagtgaagggccgattcaccatctccagagacaacgccaagaactcactgtat
ctgcaaatgaacagcctgagagccgaggacacggctgtgtattactgtgcgaga
(amino acids)
(SEQ ID NO: 27)
EVQLVESGGGLVKPGGSLRLSCAASGFTFSSYSMNWVRQAPGKGLEWVSSISSSSSYIYYADSVKGRFTISRDNAKNSLY
LQMNSLRAEDTAVYYCAR
IGHV3-21*01 heavy chain variable framework region 1 (FWR1) sequence:
(DNA)
(SEQ ID NO: 28)
gaggtgcagctggtggagtctgggggaggcctggtcaagcctggggggtccctgagactctcctgtgcagcctctggatt
caccttcagt
(amino acids)
(SEQ ID NO: 29)
EVQLVESGGGLVKPGGSLRLSCAASGFTFS
IGHV3-21*01 heavy chain variable complementarity determining regions 1 (CDR1)
sequence:
(DNA)
(SEQ ID NO: 30)
agctatagcatgaac
(amino acids)
(SEQ ID NO: 31)
SYSMN
IGHV3-21*01 heavy chain variable framework region 2 (FWR2) sequence:
(DNA)
(SEQ ID NO: 32)
tgggtccgccaggctccagggaaggggctggagtgggtctca
(amino acids)
(SEQ ID NO: 33)
WVRQAPGKGLEWVS
IGHV3-21*01 heavy chain variable complementarity determining regions 2 (CDR2)
sequence:
(DNA)
(SEQ ID NO: 34)
tccattagtagtagtagtagttacatatactacgcagactcagtgaagggc
(amino acids)
(SEQ ID NO: 35)
SISSSSSYIYYADSVKG
IGHV3-21*01 heavy chain variable framework region 3 (FWR3) sequence:
(DNA)
(SEQ ID NO: 36)
cgattcaccatctccagagacaacgccaagaactcactgtatctgcaaatgaacagcctgagagccgaggacacggctgt
gtattactgtgcgaga
(amino acids)
(SEQ ID NO: 37)
RFTISRDNAKNSLYLQMNSLRAEDTAVYYCAR
Humanized E6 heavy chain variable region sequence:
(DNA)
(SEQ ID NO: 38)
gaggtgcagctggtggagtctgggggaggcctggtcaagcctggggggtccctgagactctcctgtgcagcctctggatt
caccttcagtaggtatggcatgagctgggtccgccaggctccagggaagaggctggagtgggtctcaaccattagtggcg
gaggcacctacatatactacccagactcagtgaagggccgattcaccatctccagagacaacgccaagaacaccctgtat
ctgcaaatgaacagcctgagagccgaggacacggctgtgtattactgtaccagagataactatggccgcaactatgatta
tggcatggattattggggccagggcaccctggtgaccgtgagcagc
(amino acids)
(SEQ ID NO: 39)
EVQLVESGGGLVKPGGSLRLSCAASGFTFSRYGMSWVRQAPGKRLEWVSTISGGGTYIYYPDSVKGRFTISRDNAKNTLY
LQMNSLRAEDTAVYYCTRDNYGRNYDYGMDYWGQGTLVTVSS
Humanized E6 heavy chain variable framework region 1 (FWR1) acid sequence:
(DNA)
(SEQ ID NO: 40)
gaggtgcagctggtggagtctgggggaggcctggtcaagcctggggggtccctgagactctcctgtgcagcctctggatt
caccttcagt
(amino acids)
(SEQ ID NO: 41)
EVQLVESGGGLVKPGGSLRLSCAASGFTFS
Humanized E6 heavy chain variable complementarity determining regions 1 (CDR1)
sequence:
(DNA)
(SEQ ID NO: 42)
aggtatggcatgagc
(amino acids)
(SEQ ID NO: 43)
RYGMS
Humanized E6 heavy chain variable framework region 2 (FWR2) acid sequence:
(DNA)
(SEQ ID NO: 44)
tgggtccgccaggctccagggaagaggctggagtgggtctca
(amino acids)
(SEQ ID NO: 45)
WVRQAPGKRLEWVS
Humanized E6 heavy chain variable complementarity determining regions 2 (CDR2)
sequence:
(DNA)
(SEQ ID NO: 46)
accattagtggcggaggcacctacatatactacccagactcagtgaagggc
(amino acids)
(SEQ ID NO: 47)
TISGGGTYIYYPDSVKG
Humanized E6 heavy chain variable framework region 3 (FWR3) acid sequence:
(DNA)
(SEQ ID NO: 48)
cgattcaccatctccagagacaacgccaagaacaccctgtatctgcaaatgaacagcctgagagccgaggacacggctgtg
tattactgtaccaga
(amino acids)
(SEQ ID NO: 49)
RFTISRDNAKNTLYLQMNSLRAEDTAVYYCTR
Humanized E6 heavy chain variable complementarity determining regions 3 (CDR3)
sequence:
(DNA)
(SEQ ID NO: 50)
gataactatggccgcaactatgattatggcatggattat
(amino acids)
(SEQ ID NO: 51)
DNYGRNYDYGMDY
Humanized E6 IgG2 heavy chain synthesized by Genescript:
(DNA)
(SEQ ID NO: 52)
gaattctaagcttgggccaccatggaactggggctccgctgggttttccttgttgctattttagaaggtgtccagtgtgag
gtgcagctggtggagtctgggggaggcctggtcaagcctggggggtccctgagactctcctgtgcagcctctggattcacc
ttcagtaggtatggcatgagctgggtccgccaggctccagggaagaggctggagtgggtctcaaccattagtggcggaggc
acctacatatactacccagactcagtgaagggccgattcaccatctccagagacaacgccaagaacaccctgtatctgcaa
atgaacagcctgagagccgaggacacggctgtgtattactgtaccagagataactatggccgcaactatgattatggcatg
gattattggggccagggcaccctggtgaccgtgagcagcgcctccaccaagggcccatcggtcttccccctggcgccctgc
tccaggagcacctccgagagcacagccgccctgggctgcctggtcaaggactacttccccgaaccggtgacggtgtcgtgg
aactcaggcgctctgaccagcggcgtgcacaccttcccagctgtcctacagtcctcaggactctactccctcagcagcgtg
gtgaccgtgccctccagcaacttcggcacccagacctacacctgcaacgtagatcacaagcccagcaacaccaaggtggac
aagacagttgagcgcaaatgttgtgtcgagtgcccaccgtgcccagcaccacctgtggcaggaccgtcagtcttcctcttc
cccccaaaacccaaggacaccctcatgatctcccggacccctgaggtcacgtgcgtggtggtggacgtgagccacgaagac
cccgaggtccagttcaactggtacgtggacggcgtggaggtgcataatgccaagacaaagccacgggaggagcagttcaac
agcacgttccgtgtggtcagcgtcctcaccgttgtgcaccaggactggctgaacggcaaggagtacaagtgcaaggtctcc
aacaaaggcctcccagcccccatcgagaaaaccatctccaaaaccaaagggcagccccgagaaccacaggtgtacaccctg
cccccatcccgggaggagatgaccaagaaccaggtcagcctgacctgcctggtcaaaggcttctaccccagcgacatcgcc
gtggagtgggagagcaatgggcagccggagaacaactacaagaccacacctcccatgctggactccgacggctccttcttc
ctctacagcaagctcaccgtggacaagagcaggtggcagcaggggaacgtcttctcatgctccgtgatgcatgaggctctg
cacaaccactacacgcagaagagcctctccctgtctccgggtaaatagtaagtttaaactctaga
(amino acids)
(SEQ ID NO: 53)
EF*AWATMELGLRWVFLVAILEGVQCEVQLVESGGGLVKPGGSLRLSCAASGFTFSRYGMSWVRQAPGKRLEWVSTISGGG
TYIYYPDSVKGRFTISRDNAKNTLYLQMNSLRAEDTAVYYCTRDNYGRNYDYGMDYWGQGTLVTVSSASTKGPSVFPLAPC
SRSTSESTAALGCLVKDYFPEPVTVSWNSGALTSGVHTFPAVLQSSGLYSLSSVVTVPSSNFGTQTYTCNVDHKPSNTKVD
KTVERKCCVECPPCPAPPVAGPSVFLFPPKPKDTLMISRTPEVTCVVVDVSHEDPEVQFNWYVDGVEVHNAKTKPREEQFN
STFRVVSVLTVVHQDWLNGKEYKCKVSNKGLPAPIEKTISKTKGQPREPQVYTLPPSREEMTKNQVSLTCLVKGFYPSDIA
VEWESNGQPENNYKTTPPMLDSDGSFFLYSKLTVDKSRWQQGNVFSCSVMHEALHNHYTQKSLSLSPGK**V*TLX
Human IgG2 heavy chain constant region sequence:
(DNA)
(SEQ ID NO: 54)
gcctccaccaagggcccatcggtcttccccctggcgccctgctccaggagcacctccgagagcacagccgccctgggctgc
ctggtcaaggactacttccccgaaccggtgacggtgtcgtggaactcaggcgctctgaccagcggcgtgcacaccttccca
gctgtcctacagtcctcaggactctactccctcagcagcgtggtgaccgtgccctccagcaacttcggcacccagacctac
acctgcaacgtagatcacaagcccagcaacaccaaggtggacaagacagttgagcgcaaatgttgtgtcgagtgcccaccg
tgcccagcaccacctgtggcaggaccgtcagtcttcctcttccccccaaaacccaaggacaccctcatgatctcccggacc
cctgaggtcacgtgcgtggtggtggacgtgagccacgaagaccccgaggtccagttcaactggtacgtggacggcgtggag
gtgcataatgccaagacaaagccacgggaggagcagttcaacagcacgttccgtgtggtcagcgtcctcaccgttgtgcac
caggactggctgaacggcaaggagtacaagtgcaaggtctccaacaaaggcctcccagcccccatcgagaaaaccatctcc
aaaaccaaagggcagccccgagaaccacaggtgtacaccctgcccccatcccgggaggagatgaccaagaaccaggtcagc
ctgacctgcctggtcaaaggcttctaccccagcgacatcgccgtggagtgggagagcaatgggcagccggagaacaactac
aagaccacacctcccatgctggactccgacggctccttcttcctctacagcaagctcaccgtggacaagagcaggtggcag
caggggaacgtcttctcatgctccgtgatgcatgaggctctgcacaaccactacacgcagaagagcctctccctgtctccg
ggtaaatag
(amino acids)
(SEQ ID NO: 55)
ASTKGPSVFPLAPCSRSTSESTAALGCLVKDYFPEPVTVSWNSGALTSGVHTFPAVLQSSGLYSLSSVVTVPSSNFGTQTY
TCNVDHKPSNTKVDKTVERKCCVECPPCPAPPVAGPSVFLFPPKPKDTLMISRTPEVTCVVVDVSHEDPEVQFNWYVDGVE
VHNAKTKPREEQFNSTFRVVSVLTVVHQDWLNGKEYKCKVSNKGLPAPIEKTISKTKGQPREPQVYTLPPSREEMTKNQVS
LTCLVKGFYPSDIAVEWESNGQPENNYKTTPPMLDSDGSFFLYSKLTVDKSRWQQGNVFSCSVMHEALHNHYTQKSLSLSP
GK
Humanized E6 IgG1 heavy chain sequence:
(DNA)
(SEQ ID NO: 56)
gaggtgcagctggtggagtctgggggaggcctggtcaagcctggggggtccctgagactctcctgtgcagcctctggattc
accttcagtaggtatggcatgagctgggtccgccaggctccagggaagaggctggagtgggtctcaaccattagtggcgga
ggcacctacatatactacccagactcagtgaagggccgattcaccatctccagagacaacgccaagaacccactgtatctg
caaatgaacagcctgagagccgaggacacggctgtgtattactgtcccagagataactatggccgcaactatgattatggc
atggattattggggccagggcaccctggtgaccgtgagcagcgctagcaccaagggcccatcggtcttccccctggcaccc
tcctccaagagcacctctgggggcacagcggccctgggctgcctggtcaaggactacttccccgaaccggtgacggtgtcg
tggaactcaggcgccctgaccagcggcgtgcacaccttcccggctgtcctacagtcctcaggactctactccctcagcagc
gtggtgacagtgccctccagcagcttgggcacccagacctacatctgcaacgtgaatcacaagcccagcaacaccaaggtg
gacaagaaagttgagcccaaatcttgtgacaaaactcacacatgcccaccgtgcccagcacctgaactcctggggggaccg
tcagtcttcctcttccccccaaaacccaaggacaccctcatgatctcccggacccctgaggtcacatgcgtggtggtggac
gtgagccacgaagaccctgaggtcaagttcaactggtacgtggacggcgtggaggtgcataatgccaagacaaagccgcgg
gaggagcagtacaacagcacgtaccgtgtggtcagcgtcctcaccgtcctgcaccaggactggctgaatggcaaggagtac
aagtgcaaggtctccaacaaagccctcccagcccccatcgagaaaaccatctccaaagccaaagggcagccccgagaacca
caggtgtacaccctgcccccatcccgggaggagatgaccaagaaccaggtcagcctgacctgcctggtcaaaggcttctat
cccagcgacatcgccgtggagtgggagagcaatgggcagccggagaacaactacaagaccacgcctcccgtgctggactcc
gacggctccttcttcctctacagcaagctcaccgtggacaagagcaggtggcagcaggggaacgtcttctcatgctccgtg
atgcatgaggctctgcacaaccactacacgcagaagagcctctccctgtctccgggtaaatgataa
(amino acids)
(SEQ ID NO: 57)
EVQLVESGGGLVKPGGSLRLSCAASGFTFSRYGMSWVRQAPGKRLEWVSTISGGGTYIYYPDSVKGRFTISRDNAKNPLYL
QMNSLRAEDTAVYYCPRDNYGRNYDYGMDYWGQGTLVTVSSASTKGPSVFPLAPSSKSTSGGTAALGCLVKDYFPEPVTVS
WNSGALTSGVHTFPAVLQSSGLYSLSSVVTVPSSSLGTQTYICNVNHKPSNTKVDKKVEPKSCDKTHTCPPCPAPELLGGP
SVFLFPPKPKDTLMISRTPEVTCVVVDVSHEDPEVKFNWYVDGVEVHNAKTKPREEQYNSTYRVVSVLTVLHQDWLNGKEY
KCKVSNKALPAPIEKTISKAKGQPREPQVYTLPPSREEMTKNQVSLTCLVKGFYPSDIAVEWESNGQPENNYKTTPPVLDS
DGSFFLYSKLTVDKSRWQQGNVFSCSVMHEALHNHYTQKSLSLSPGK**
Human IgG1 heavy chain constant region sequence:
(DNA)
(SEQ ID NO: 58)
gctagcaccaagggcccatcggtcttccccctggcaccctcctccaagagcacctctgggggcacagcggccctgggctgc
ctggtcaaggactacttccccgaaccggtgacggtgtcgtggaactcaggcgccctgaccagcggcgtgcacaccttcccg
gctgtcctacagtcctcaggactctactccctcagcagcgtggtgacagtgccctccagcagcttgggcacccagacctac
atctgcaacgtgaatcacaagcccagcaacaccaaggtggacaagaaagttgagcccaaatcttgtgacaaaactcacaca
tgcccaccgtgcccagcacctgaactcctggggggaccgtcagtcttcctcttccccccaaaacccaaggacaccctcatg
atctcccggacccctgaggtcacatgcgtggtggtggacgtgagccacgaagaccctgaggtcaagttcaactggtacgtg
gacggcgtggaggtgcataatgccaagacaaagccgcgggaggagcagtacaacagcacgtaccgtgtggtcagcgtcctc
accgtcctgcaccaggactggctgaatggcaaggagtacaagtgcaaggtctccaacaaagccctcccagcccccatcgag
aaaaccatctccaaagccaaagggcagccccgagaaccacaggtgtacaccctgcccccatcccgggaggagatgaccaag
aaccaggtcagcctgacctgcctggtcaaaggcttctatcccagcgacatcgccgtggagtgggagagcaatgggcagccg
gagaacaactacaagaccacgcctcccgtgctggactccgacggctccttcttcctctacagcaagctcaccgtggacaag
agcaggtggcagcaggggaacgtcttctcatgctccgtgatgcatgaggctctgcacaaccactacacgcagaagagcctc
tccctgtctccgggtaaatgataa
(amino acids)
(SEQ ID NO: 59)
ASTKGPSVFPLAPSSKSTSGGTAALGCLVKDYFPEPVTVSWNSGALTSGVHTFPAVLQSSGLYSLSSVVTVPSSSLGTQTY
ICNVNHKPSNTKVDKKVEPKSCDKTHTCPPCPAPELLGGPSVFLFPPKPKDTLMISRTPEVTCVVVDVSHEDPEVKFNWYV
DGVEVHNAKTKPREEQYNSTYRVVSVLTVLHQDWLNGKEYKCKVSNKALPAPIEKTISKAKGQPREPQVYTLPPSREEMTK
NQVSLTCLVKGFYPSDIAVEWESNGQPENNYKTTPPVLDSDGSFFLYSKLTVDKSRWQQGNVFSCSVMHEALHNHYTQKSL
SLSPGK**
Human IgG1 heavy chain constant region gBLOCK#1 sequence:
(DNA)
(SEQ ID NO: 60)
atggcatggattattggggccagggcaccctggtgaccgtgagcagcgctagcaccaagggcccatcggtcttccccctgg
caccctcctccaagagcacctctgggggcacagcggccctgggctgcctggtcaaggactacttccccgaaccggtgacgg
tgtcgtggaactcaggcgccctgaccagcggcgtgcacaccttcccggctgtcctacagtcctcaggactctactccctca
gcagcgtggtgacagtgccctccagcagcttgggcacccagacctacatctgcaacgtgaatcacaagcccagcaacacca
aggtggacaagaaagttgagcccaaatcttgtgacaaaactcacacatgcccaccgtgcccagcacctgaactcctggggg
gaccgtcagtcttcctcttccccccaaaacccaaggacaccctcatgatctcccggacccctgaggtcacatgcgtggtgg
tggacgtgagccacgaagaccctgaggtcaagttcaactggtacgtggacggcgtggaggtgcataatgccaag
Human IgG1 heavy chain constant region gBLOCK#2 sequence:
(DNA)
(SEQ ID NO: 61)
tacgtggacggcgtggaggtgcataatgccaagacaaagccgcgggaggagcagtacaacagcacgtaccgtgtggtcagc
gtcctcaccgtcctgcaccaggactggctgaatggcaaggagtacaagtgcaaggtctccaacaaagccctcccagccccc
atcgagaaaaccatctccaaagccaaagggcagccccgagaaccacaggtgtacaccctgcccccatcccgggaggagatg
accaagaaccaggtcagcctgacctgcctggtcaaaggcttctatcccagcgacatcgccgtggagtgggagagcaatggg
cagccggagaacaactacaagaccacgcctcccgtgctggactccgacggctccttcttcctctacagcaagctcaccgtg
gacaagagcaggtggcagcaggggaacgtcttctcatgctccgtgatgcatgaggctctgcacaaccactacacgcagaag
agcctctccctgtctccgggtaaatgataagtttaaacccgctgatcagcctcgactgtgccttctagttg
E6 heavy chain variable region overlapping sequence:
(DNA)
(SEQ ID NO: 62)
atggcatggattattggggccagggcaccct
IgG1 heavy chain constant region overlapping region sequence:
(DNA)
(SEQ ID NO: 63)
tacgtggacggcgtggaggtgcataatgccaag
pCDNA3.1 V5 and pSECTag2 overlapping sequence:
(DNA)
(SEQ ID NO: 64)
ccgctgatcagcctcgactgtgccttctagttg
Mouse E6 Light Chain variable region sequence:
(DNA)
(SEQ ID NO: 65)
caaattgttctcacccagtctccagcaatcatgtctgcatctccaggggaggaggtcaccctaacctgcagtgccacctca
agtgtaagttacatacactggttccagcagaggccaggcacttctcccaaactctggatttatagcacatccaacctggct
tctggagtccctgttcgcttcagtggcagtggatatgggacctcttactctctcacaatcagccgaatggaggctgaagat
gctgccacttattactgccagcaaaggagtagttccccattcacgttcggctcggggacaaagttggaaataaaa
(amino acids)
(SEQ ID NO: 66)
QIVLTQSPAIMSASPGEEVTLTCSATSSVSYIHWFQQRPGTSPKLWIYSTSNLASGVPVRFSGSGYGTSYSLTISRMEAED
AATYYCQQRSSSPFTFGSGTKLEIK
Mouse E6 light chain variable framework region 1 (FWR1) sequence:
(DNA)
(SEQ ID NO: 67)
caaattgttctcacccagtctccagcaatcatgtctgcatctccaggggaggaggtcaccctaacctgc
(amino acids)
(SEQ ID NO: 68)
QIVLTQSPAIMSASPGEEVTLTC
Mouse E6 light chain variable complementarity determining regions 1 (CDR1)
sequence:
(DNA)
(SEQ ID NO: 69)
AGTGCCACCTCAAGTGTAAGTTACATACAC
(amino acids)
(SEQ ID NO: 70)
SATSSVSYIH
Mouse E6 light chain variable framework region 2 (FWR2) sequence:
(DNA)
(SEQ ID NO: 71)
tggttccagcagaggccaggcacttctcccaaactctggatttat
(amino acids)
(SEQ ID NO: 72)
WFQQRPGTSPKLWIY
Mouse E6 light chain variable complementarity determining regions 2 (CDR2)
sequence:
(DNA)
(SEQ ID NO: 73)
agcacatccaacctggcttct
(amino acids)
(SEQ ID NO: 74)
STSNLAS
Mouse E6 light chain variable framework region 3 (FWR3) sequence:
(DNA)
(SEQ ID NO: 75)
ggagtccctgttcgcttcagtggcagtggatatgggacctcttactctctcacaatcagccgaatggaggctgaagatgc
tgccacttattactgc
(amino acids)
(SEQ ID NO: 76)
GVPVRFSGSGYGTSYSLTISRMEAEDAATYYC
Mouse E6 light chain variable complementarity determining regions 3 (CDR3)
sequence:
(DNA)
(SEQ ID NO: 77)
cagcaaaggagtagttccccattcacg
(amino acids)
(SEQ ID NO: 78)
QQRSSSPFT
IGKV3-11*02 light chain variable region sequence:
(DNA)
(SEQ ID NO: 79)
gaaattgtgttgacacagtctccagccaccctgtctttgtctccaggggaaagagccaccctctcctgcagggccagtca
gagtgttagcagctacttagcctggtaccaacagaaacctggccaggctcccaggctcctcatctatgatgcatccaaca
gggccactggcatcccagccaggttcagtggcagtgggtctgggagagacttcactctcaccatcagcagcctagagcct
gaagattttgcagtttattactgtcagcagcgtagcaactggcctcc
(amino acids)
(SEQ ID NO: 80)
EIVLTQSPATLSLSPGERATLSCRASQSVSSYLAWYQQKPGQAPRLLIYDASNRATGIPA
RFSGSGSGRDFTLTISSLEPEDFAVYYCQQRSNWPP
IGKV3-11*02 light chain variable framework region 1 (FWR1) acid sequence:
(DNA)
(SEQ ID NO: 81)
gaaattgtgttgacacagtctccagccaccctgtctttgtctccaggggaaagagccaccctctcctgc
(amino acids)
(SEQ ID NO: 82)
EIVLTQSPATLSLSPGERATLSC
IGKV3-11*02 light chain variable complementarity determining regions 1 (CDR1)
sequence:
(DNA)
(SEQ ID NO: 83)
agggccagtcagagtgttagcagctacttagcc
(amino acids)
(SEQ ID NO: 84)
RASQSVSSYLA
IGKV3-11*02 light chain variable framework region 2 (FWR2) sequence:
(DNA)
(SEQ ID NO: 85)
tggtaccaacagaaacctggccaggctcccaggctcctcatctat
(amino acids)
(SEQ ID NO 86)
WYQQKPGQAPRLLIY
IGKV3-11*02 light chain variable complementarity determining regions 2 (CDR2)
sequence:
(DNA)
(SEQ ID NO: 87)
gatgcatccaacagggccact
(amino acids)
(SEQ ID NO: 88)
DASNRAT
IGKV3-11*02 light chain variable framework region 3 (FWR3) sequence:
(DNA)
(SEQ ID NO: 89)
ggcatcccagccaggttcagtggcagtgggtctgggagagacttcactctcaccatcagcagcctagagcctgaagattt
tgcagtttattactgt
(amino acids)
(SEQ ID NO: 90)
GIPARFSGSGSGTDFTLTISSLEPEDFAVYYC
IGKV3-11*02 light chain variable complementarity determining regions3 (CDR3)
sequence:
(DNA)
(SEQ ID NO: 91)
cagcagcgtagcaactggcctcc
(amino acids)
(SEQ ID NO: 92)
QQRSNWPP
Humanized E6 light chain variable region sequence:
(DNA)
(SEQ ID NO: 93)
gaaattgtgttgacacagtctccagccaccctgtctttgtctccaggggaaagagccaccctcacctgcagcgccaccagc
agtgttagctacatccactggtaccaacagaggcctggccagagccccaggctcctcatctatagcacctccaacctggcc
agcggcatcccagccaggttcagtggcagtgggtctgggagcgactacactctcaccatcagcagcctagagcctgaagat
tttgcagtttattactgtcagcagcgtagcagctcccctttcacctttggcagcggcaccaaagtggaaattaaa
(amino acids)
(SEQ ID NO: 94)
EIVLTQSPATLSLSPGERATLTCSATSSVSYIHWYQQRPGQSPRLLIYSTSNLASGIPARFSGSGSGSDYTLTISSLEPED
FAVYYCQQRSSSPFTFGSGTKVEIK
Humanized E6 light chain variable framework region 1 (FWR1) acid sequence:
(DNA)
(SEQ ID NO: 95)
gaaattgtgttgacacagtctccagccaccctgtctttgtctccaggggaaagagccaccctcacctgc
(amino acids)
(SEQ ID NO: 96)
EIVLTQSPATLSLSPGERATLTC
Humanized E6 light chain variable complementarity determining regions 1 (CDR1)
sequence:
(DNA)
(SEQ ID NO: 97)
agcgccaccagcagtgttagctacatccac
(amino acids)
(SEQ ID NO: 98)
SATSSVSYIH
Humanized E6 heavy light variable framework region 2 (FWR2) acid sequence:
(DNA)
(SEQ ID NO: 99)
tggtaccaacagaggcctggccagagccccaggctcctcatctat
(amino acids)
(SEQ ID NO: 100)
WYQQRPGQSPRLLIY
Humanized E6 light chain variable complementarity determining regions 2 (CDR2)
sequence:
(DNA)
(SEQ ID NO: 101)
agcacctccaacctggccagc
(amino acids)
(SEQ ID NO: 102)
STSNLAS
Humanized E6 light chain variable framework region 3 (FWR3) acid sequence:
(DNA)
(SEQ ID NO: 103)
ggcatcccagccaggttcagtggcagtgggtctgggagcgactacactctcaccatcagcagcctagagcctgaagatttt
gcagtttattactgt
(amino acids)
(SEQ ID NO: 104)
GIPARFSGSGSGSDYTLTISSLEPEDFAVYYC
Humanized E6 light chain variable complementarity determining regions 3 (CDR3)
sequence:
(DNA)
(SEQ ID NO: 105)
cagcagcgtagcagctcccctttcacc
(amino acids)
(SEQ ID NO: 106)
QQRSSSPFT
Humanized E6 Kappa light chain synthesized by Genescript:
(DNA)
(SEQ ID NO: 107)
gaattctaagcttgggccaccatggaagccccagcgcagcttctcttcctcctgctactctggctcccagataccactgga
gaaattgtgttgacacagtctccagccaccctgtctttgtctccaggggaaagagccaccctcacctgcagcgccaccagc
agtgttagctacatccactggtaccaacagaggcctggccagagccccaggctcctcatctatagcacctccaacctggcc
agcggcatcccagccaggttcagtggcagtgggtctgggagcgactacactctcaccatcagcagcctagagcctgaagat
tttgcagtttattactgtcagcagcgtagcagctcccctttcacctttggcagcggcaccaaagtggaaattaaaaggacg
gtggctgcaccatctgtcttcatcttcccgccatctgatgagcagttgaaatctggaactgcctctgttgtgtgcctgctg
aataacttctatcccagagaggccaaagtacagtggaaggtggataacgccctccaatcgggtaactcccaggagagtgtc
acagagcaggacagcaaggacagcacctacagcctcagcagcaccctgacgctgagcaaagcagactacgagaaacacaaa
gtctacgcctgcgaagtcacccatcagggcctgagctcgcccgtcacaaagagcttcaacaggggagagtgttagtaagtt
taaactctaga
(amino acids)
(SEQ ID NO: 108)
EF*AWATMEAPAQLLFLLLLWLPDTTGEIVLTQSPATLSLSPGERATLTCSATSSVSYIHWYQQRPGQSPRLLIYSTSNLA
SGIPARFSGSGSGSDYTLTISSLEPEDFAVYYCQQRSSSPFTFGSGTKVEIKRTVAAPSVFIFPPSDEQLKSGTASVVCLL
NNFYPREAKVQWKVDNALQSGNSQESVTEQDSKDSTYSLSSTLTLSKADYEKHKVYACEVTHQGLSSPVTKSFNRGEC**V
*TLX
Human Kappa light chain constant region sequence:
(DNA)
(SEQ ID NO: 109)
aggacggtggctgcaccatctgtcttcatcttcccgccatctgatgagcagttgaaatctggaactgcctctgttgtgtgc
ctgctgaataacttctatcccagagaggccaaagtacagtggaaggtggataacgccctccaatcgggtaactcccaggag
agtgtcacagagcaggacagcaaggacagcacctacagcctcagcagcaccctgacgctgagcaaagcagactacgagaaa
cacaaagtctacgcctgcgaagtcacccatcagggcctgagctcgcccgtcacaaagagcttcaacaggggagagtgttag
(amino acids)
(SEQ ID NO: 110)
[sequence omitted]
Humanized E6 lambda light chain sequence:
(DNA)
(SEQ ID NO: 111)
gaaattgtgttgacacagtctccagccaccctgtctttgtctccaggggaaagagccaccctcacctgcagcgccaccagc
agtgttagctacatccactggtaccaacagaggcctggccagagccccaggctcctcatctatagcacctccaacctggcc
agcggcatcccagccaggttcagtggcagtgggtctgggagcgactacactctcaccatcagcagcctagagcctgaagat
tttgcagtttattactgtcagcagcgtagcagctcccctttcacctttggcagcggcaccaaagtggaaattaaaggtcag
cccaaggctgccccctcggtcactctgttcccgccctcctctgaggagcttcaagccaacaaggccacactggtgtgtctc
ataagtgacttctacccgggagccgtgacagtggcctggaaggcagatagcagccccgtcaaggcgggagtggagaccacc
acaccctccaaacaaagcaacaacaagtacgcggccagcagctatctgagcctgacgcctgagcagtggaagtcccacaga
agctacagctgccaggtcacgcatgaagggagcaccgtggagaagacagtggcccctacagaatgttcatagtaa
(amino acids)
(SEQ ID NO: 112)
EIVLTQSPATLSLSPGERATLTCSATSSVSYIHWYQQRPGQSPRLLIYSTSNLASGIPARFSGSGSGSDYTLTISSLEPED
FAVYYCQQRSSSPFTFGSGTKVEIKGQPKAAPSVTLFPPSSEELQANKATLVCLISDFYPGAVTVAWKADSSPVKAGVETT
TPSKQSNNKYAASSYLSLTPEQWKSHRSYSCQVTHEGSTVEKTVAPTECS**
Humanized lambda light chain constant region sequence:
(DNA)
(SEQ ID NO: 113)
ggtcagcccaaggctgccccctcggtcactctgttcccgccctcctctgaggagcttcaagccaacaaggccacactggtg
tgtctcataagtgacttctacccgggagccgtgacagtggcctggaaggcagatagcagccccgtcaaggcgggagtggag
accaccacaccctccaaacaaagcaacaacaagtacgcggccagcagctatctgagcctgacgcctgagcagtggaagtcc
cacagaagctacagctgccaggtcacgcatgaagggagcaccgtggagaagacagtggcccctacagaatgttcatagtaa
(amino acids)
(SEQ ID NO: 114)
GQPKAAPSVTLFPPSSEELQANKATLVCLISDFYPGAVTVAWKADSSPVKAGVETTTPSKQSNNKYAASSYLSLTPEQWKS
HRSYSCQVTHEGSTVEKTVAPTECS**
Human lambda light chain constant region gBLOCK#3 sequence:
(DNA)
(SEQ ID NO: 115)
agcgccaccagcagtgttagctacatccactggtaccaacagaggcctggccagagccccaggctcctcatctatagcacc
tccaacctggccagcggcatcccagccaggttcagtggcagtgggtctgggagcgactacactctcaccatcagcagccta
gagcctgaagattttgcagtttattactgtcagcagcgtagcagctcccctttcacctttggcagcggcaccaaagtggaa
attaaaggtcagcccaaggctgccccctcggtcactctgttcccgccctcctctgaggagcttcaagccaacaaggccaca
ctggtgtgtctcataagtgacttctacccgggagccgtgacagtggcctggaaggcagatagcagccccgtcaaggcggga
gtggagaccaccacaccctccaaacaaagcaacaacaagtacgcggccagcagctatctgagcctgacgcctgagcagtgg
aagtcccacagaagctacagctgccaggtcacgcatgaagggagcaccgtggagaagacagtggcccctacagaatgttca
tagtaagtttaaacccgctgatcagcctcgactgtgccttctagttg
E6 light chain variable region overlapping sequence:
(DNA)
(SEQ ID NO: 116)
agcgccaccagcagtgttagctacatccact
pCDNA3.1 V5 and pSECTag2 overlapping sequence:
(DNA)
(SEQ ID NO: 117)
ccgctgatcagcctcgactgtgccttctagttg
Mouse C2 heavy chain variable region sequence:
(DNA)
(SEQ ID NO: 118)
gaggtccagctggaggagtcagggggaggcttagtgaagcctggagggtccctgaaactctcctgtgcagcctctggatt
cactttcagtggctatgccatgtcttgggttcgccagactccggagaagaggctggagtgggtcgcaaccattagtagtg
gtggtacttatatctactatccagacagtgtgaaggggcgattcaccatctccagagacaatgccaagaacaccctgtac
ctgcaaatgagcagtctgaggtctgaggacacggccatgtattactgtgcaagacttgggggggataattactacgaata
cttcgatgtctggggcgcagggaccacggtcaccgtctcctccgccaaaacgacacccccatctgtctat
(amino acids)
(SEQ ID NO: 119)
EVQLEESGGGLVKPGGSLKLSCAASGFTFSGYAMSWVRQTPEKRLEWVATISSGGTYIYYPDSVKGRFTISRDNAKNTLY
LQMSSLRSEDTAMYYCARLGGDNYYEYFDVWGAGTTVTVSSAKTTPPSVY
Mouse C2 heavy chain variable framework region 1 (FWR1) sequence:
(DNA)
(SEQ ID NO: 120)
gaggtccagctggaggagtcagggggaggcttagtgaagcctggagggtccctgaaactctcctgtgcagcctctggatt
cactttcagt
(amino acids)
(SEQ ID NO: 121)
EVQLEESGGGLVKPGGSLKLSCAASGFTFS
Mouse C2 heavy chain variable complementarity determining regions 1 (CDR1)
sequence:
(DNA)
(SEQ ID NO: 122)
ggctatgccatgtct
(amino acids)
(SEQ ID NO: 123)
GYAMS
Mouse C2 heavy chain variable framework region 2 (FWR2) sequence:
(DNA)
(SEQ ID NO: 124)
tgggttcgccagactccggagaagaggctggagtgggtcgca
(amino acids)
(SEQ ID NO: 125)
WVRQTPEKRLEWVA
Mouse C2 heavy chain variable complementarity determining regions 2 (CDR2)
sequence:
(DNA)
(SEQ ID NO: 126)
accattagtagtggtggtacttatatctactatccagacagtgtgaagggg
(amino acids)
(SEQ ID NO: 127)
TISSGGTYIYYPDSVKG
Mouse C2 heavy chain variable framework region 3 (FWR3) sequence:
(DNA)
(SEQ ID NO: 128)
cgattcaccatctccagagacaatgccaagaacaccctgtacctgcaaatgagcagtctgaggtctgaggacacggccatg
tattactgtgcaaga
(amino acids)
(SEQ ID NO: 129)
RFTISRDNAKNTLYLQMSSLRSEDTAMYYCAR
Mouse C2 heavy chain variable complementarity determining regions 3 (CDR3)
sequence:
(DNA)
(SEQ ID NO: 130)
cttgggggggataattactacgaatacttcgatgtc
(amino acids)
(SEQ ID NO: 131)
LGGDNYYEYFDV
IGHV3-21*04 heavy chain variable region sequence:
(DNA)
(SEQ ID NO: 132)
gaggtgcagctggtggagtctgggggaggcctggtcaagcctggggggtccctgagactctcctgtgcagcctctggatt
caccttcagtagctatagcatgaactgggtccgccaggctccagggaaggggctggagtgggtctcatccattagtagta
gtagtagttacatatactacgcagactcagtgaagggccgattcaccatctccagagacaacgccaagaactcactgtat
ctgcaaatgaacagcctgagagccgaggacacggccgtgtattactgtgcgaga
(amino acids)
(SEQ ID NO: 133)
EVQLVESGGGLVKPGGSLRLSCAASGFTFSSYSMNWVRQAPGKGLEWVSSISSSSSYIYYADSVKGRFTISRDNAKNSLY
LQMNSLRAEDTAVYYCAR
IGHV3-21*04 heavy chain variable framework region 1 (FWR1) sequence:
(DNA)
(SEQ ID NO: 134)
gaggtgcagctggtggagtctgggggaggcctggtcaagcctggggggtccctgagactctcctgtgcagcctctggatt
caccttcagt
(amino acids)
(SEQ ID NO: 135)
EVQLVESGGGLVKPGGSLRLSCAASGFTFS
IGHV3-21*04 heavy chain variable complementarity determining regions 1 (CDR1)
sequence:
(DNA)
(SEQ ID NO: 136)
agctatagcatgaac
(amino acids)
(SEQ ID NO: 137)
SYSMN
IGHV3-21*04 heavy chain variable framework region 2 (FWR2) sequence:
(DNA)
(SEQ ID NO: 138)
gggtccgccaggctccagggaaggggctggagtgggtctca
(amino acids)
(SEQ ID NO: 139)
WVRQAPGKGLEWVS
IGHV3-21*04 heavy chain variable complementarity determining regions 2 (CDR2)
sequence:
(DNA)
(SEQ ID NO: 140)
tccattagtagtagtagtagttacatatactacgcagactcagtgaagggc
(amino acids)
(SEQ ID NO: 141)
SISSSSSYIYYADSVKG
IGHV3-21*04 heavy chain variable framework region 3 (FWR3) sequence:
(DNA)
(SEQ ID NO: 142)
cgattcaccatctccagagacaacgccaagaactcactgtatctgcaaatgaacagcctgagagccgaggacacggccgt
gtattactgtgcgaga
(amino acids)
(SEQ ID NO: 143)
RFTISRDNAKNSLYLQMNSLRAEDTAVYYCAR
Humanized C2 heavy chain variable region sequence:
(DNA)
(SEQ ID NO: 144)
gaggtgcagctggtggagtctgggggaggcctggtcaagcctggggggtccctgagactctcctgtgcagcctctggattc
accttcagtggctatgccatgagctgggtccgccaggctccagggaaggggctggagtgggtctcaaccattagtagtggc
ggaacctacatatactaccccgactcagtgaagggccgattcaccatctccagagacaacgccaagaactcactgtatctg
caaatgaacagcctgagagccgaggacacggccgtgtattactgtgcgagacttgggggggataattactacgaatacttc
gatgtctggggcaaagggaccacggtcaccgtctcctcc
(amino acids)
(SEQ ID NO: 145)
EVQLVESGGGLVKPGGSLRLSCAASGFTFSGYAMSWVRQAPGKGLEWVSTISSGGTYIYYPDSVKGRFTISRDNAKNSLYL
QMNSLRAEDTAVYYCARLGGDNYYEYFDVWGKGTTVTVSS
Humanized C2 heavy chain variable framework region 1 (FWR1) sequence:
(DNA)
(SEQ ID NO: 146)
gaggtgcagctggtggagtctgggggaggcctggtcaagcctggggggtccctgagactctcctgtgcagcctctggattc
accttcagt
(amino acids)
(SEQ ID NO: 147)
EVQLVESGGGLVKPGGSLRLSCAASGFTFS
Humanized C2 heavy chain variable complementarity determining regions 1 (CDR1)
sequence:
(DNA)
(SEQ ID NO: 148)
ggctatgccatgagc
(amino acids)
(SEQ ID NO: 149)
GYAMS
Humanized C2 heavy chain variable framework region 2 (FWR2) sequence:
(DNA)
(SEQ ID NO: 150)
tgggtccgccaggctccagggaaggggctggagtgggtctcaa
(amino acids)
(SEQ ID NO: 151)
WVRQAPGKGLEWVS
Humanized C2 heavy chain variable complementarity determining regions 2 (CDR2)
sequence:
(DNA)
(SEQ ID NO: 152)
accattagtagtggcggaacctacatatactaccccgactcagtgaagggc
(amino acids)
(SEQ ID NO: 153)
TISSGGTYIYYPDSVKG
Humanized C2 heavy chain variable framework region 3 (FWR3) sequence:
(DNA)
(SEQ ID NO: 154)
cgattcaccatctccagagacaacgccaagaactcactgtatctgcaaatgaacagcctgagagccgaggacacggccgtg
tattactgtgcgaga
(amino acids)
(SEQ ID NO: 155)
RFTISRDNAKNSLYLQMNSLRAEDTAVYYCAR
Humanized C2 heavy chain variable complementarity determining regions 3 (CDR3)
sequence:
(DNA)
(SEQ ID NO: 156)
cttgggggggataattactacgaatacttcgatgtc
(amino acids)
(SEQ ID NO: 157)
LGGDNYYEYFDV
Humanized C2 IgG1 heavy chain sequence
(DNA)
(SEQ ID NO: 157)
gaggtgcagctggtggagtctgggggaggcctggtcaagcctggggggtccctgagactctcctgtgcagcctctggattc
accttcagtggctatgccatgagctgggtccgccaggctccagggaaggggctggagtgggtctcaaccattagtagtggc
ggaacctacatatactaccccgactcagtgaagggccgattcaccatctccagagacaacgccaagaactcactgtatctg
caaatgaacagcctgagagccgaggacacggccgtgtattactgtgcgagacttgggggggataattactacgaatacttc
gatgtctggggcaaagggaccacggtcaccgtctcctccgctagcaccaagggcccatcggtcttccccctggcaccctcc
tccaagagcacctctgggggcacagcggccctgggctgcctggtcaaggactacttccccgaaccggtgacggtgtcgtgg
aactcaggcgccctgaccagcggcgtgcacaccttcccggctgtcctacagtcctcaggactctactccctcagcagcgtg
gtgacagtgccctccagcagcttgggcacccagacctacatctgcaacgtgaatcacaagcccagcaacaccaaggtggac
aagaaagttgagcccaaatcttgtgacaaaactcacacatgcccaccgtgcccagcacctgaactcctggggggaccgtca
gtcttcctcttccccccaaaacccaaggacaccctcatgatctcccggacccctgaggtcacatgcgtggtggtggacgtg
agccacgaagaccctgaggtcaagttcaactggtacgtggacggcgtggaggtgcataatgccaagacaaagccgcgggag
gagcagtacaacagcacgtaccgtgtggtcagcgtcctcaccgtcctgcaccaggactggctgaatggcaaggagtacaag
tgcaaggtctccaacaaagccctcccagcccccatcgagaaaaccatctccaaagccaaagggcagccccgagaaccacag
gtgtacaccctgcccccatcccgggaggagatgaccaagaaccaggtcagcctgacctgcctggtcaaaggcttctatccc
agcgacatcgccgtggagtgggagagcaatgggcagccggagaacaactacaagaccacgcctcccgtgctggactccgac
ggctccttcttcctctacagcaagctcaccgtggacaagagcaggtggcagcaggggaacgtcttctcatgctccgtgatg
catgaggctctgcacaaccactacacgcagaagagcctctccctgtctccgggtaaatgataa
(amino acids)
(SEQ ID NO: 158)
EVQLVESGGGLVKPGGSLRLSCAASGFTFSGYAMSWVRQAPGKGLEWVSTISSGGTYIYYPDSVKGRFTISRDNAKNSLYL
QMNSLRAEDTAVYYCARLGGDNYYEYFDVWGKGTTVTVSSASTKGPSVFPLAPSSKSTSGGTAALGCLVKDYFPEPVTVSW
NSGALTSGVHTFPAVLQSSGLYSLSSVVTVPSSSLGTQTYICNVNHKPSNTKVDKKVEPKSCDKTHTCPPCPAPELLGGPS
VFLFPPKPKDTLMISRTPEVTCVVVDVSHEDPEVKFNWYVDGVEVHNAKTKPREEQYNSTYRVVSVLTVLHQDWLNGKEYK
CKVSNKALPAPIEKTISKAKGQPREPQVYTLPPSREEMTKNQVSLTCLVKGFYPSDIAVEWESNGQPENNYKTTPPVLDSD
GSFFLYSKLTVDKSRWQQGNVFSCSVMHEALHNHYTQKSLSLSPGK**
Humanized C2 gBLOCK#4 sequence:
(DNA)
(SEQ ID NO: 160)
actcactatagggagacccaagctggctagttaagcttgggccaccatggagacagacacactcctgctatgggtactgct
gctctgggttccaggttccactggtgacgaggtgcagctggtggagtctgggggaggcctggtcaagcctggggggtccct
gagactctcctgtgcagcctctggattcaccttcagtggctatgccatgagctgggtccgccaggctccagggaaggggct
ggagtgggtctcaaccattagtagtggcggaacctacatatactaccccgactcagtgaagggccgattcaccatctccag
agacaacgccaagaactcactgtatctgcaaatgaacagcctgagagccgaggacacggccgtgtattactgtgcgagact
tgggggggataattactacgaatacttcgatgtctggggcaaagggaccacggtcaccgtctcctccgctagcaccaaggg
cccatcggtcttccccctggcaccctcctccaagagcacctctgggggcacagcggccctgggctgcctggtcaaggacta
cttccccgaaccggtgacggtgtcgtggaactcaggcgccctgaccagc
pCDNA3.1 V5 overlapping sequence:
(DNA)
(SEQ ID NO: 161)
actcactatagggagacccaagctggctagtt
Human IgG1 constant region overlapping sequence:
(DNA)
(SEQ ID NO: 162)
gacggtgtcgtggaactcaggcgccctgaccagc
Humanized C2 IgG2 heavy chain sequence
(DNA)
(SEQ ID NO: 163)
gaggtgcagctggtggagtctgggggaggcctggtcaagcctggggggtccctgagactctcctgtgcagcctctggattc
accttcagtggctatgccatgagctgggtccgccaggctccagggaaggggctggagtgggtctcaaccattagtagtggc
ggaacctacatatactaccccgactcagtgaagggccgattcaccatctccagagacaacgccaagaactcactgtatctg
caaatgaacagcctgagagccgaggacacggccgtgtattactgtgcgagacttgggggggataattactacgaatacttc
gatgtctggggcaaagggaccacggtcaccgtctcctccgcctccaccaagggcccatcggtcttccccctggcgccctgc
tccaggagcacctccgagagcacagccgccctgggctgcctggtcaaggactacttccccgaaccggtgacggtgtcgtgg
aactcaggcgctctgaccagcggcgtgcacaccttcccagctgtcctacagtcctcaggactctactccctcagcagcgtg
gtgaccgtgccctccagcaacttcggcacccagacctacacctgcaacgtagatcacaagcccagcaacaccaaggtggac
aagacagttgagcgcaaatgttgtgtcgagtgcccaccgtgcccagcaccacctgtggcaggaccgtcagtcttcctcttc
cccccaaaacccaaggacaccctcatgatctcccggacccctgaggtcacgtgcgtggtggtggacgtgagccacgaagac
cccgaggtccagttcaactggtacgtggacggcgtggaggtgcataatgccaagacaaagccacgggaggagcagttcaac
agcacgttccgtgtggtcagcgtcctcaccgttgtgcaccaggactggctgaacggcaaggagtacaagtgcaaggtctcc
aacaaaggcctcccagcccccatcgagaaaaccatctccaaaaccaaagggcagccccgagaaccacaggtgtacaccctg
cccccatcccgggaggagatgaccaagaaccaggtcagcctgacctgcctggtcaaaggcttctaccccagcgacatcgcc
gtggagtgggagagcaatgggcagccggagaacaactacaagaccacacctcccatgctggactccgacggctccttcttc
ctctacagcaagctcaccgtggacaagagcaggtggcagcaggggaacgtcttctcatgctccgtgatgcatgaggctctg
cacaaccactacacgcagaagagcctctccctgtctccgggtaaatagtaa
(amino acids)
(SEQ ID NO: 164)
EVQLVESGGGLVKPGGSLRLSCAASGFTFSGYAMSWVRQAPGKGLEWVSTISSGGTYIYYPDSVKGRFTISRDNAKNSLYL
QMNSLRAEDTAVYYCARLGGDNYYEYFDVWGKGTTVTVSSASTKGPSVFPLAPCSRSTSESTAALGCLVKDYFPEPVTVSW
NSGALTSGVHTFPAVLQSSGLYSLSSVVTVPSSNFGTQTYTCNVDHKPSNTKVDKTVERKCCVECPPCPAPPVAGPSVFLF
PPKPKDTLMISRTPEVTCVVVDVSHEDPEVQFNWYVDGVEVHNAKTKPREEQFNSTFRVVSVLTVVHQDWLNGKEYKCKVS
NKGLPAPIEKTISKTKGQPREPQVYTLPPSREEMTKNQVSLTCLVKGFYPSDIAVEWESNGQPENNYKTTPPMLDSDGSFF
LYSKLTVDKSRWQQGNVFSCSVMHEALHNHYTQKSLSLSPGK**
Humanized C2 gBLOCK#5 sequence:
(DNA)
(SEQ ID NO: 165)
tgctctgggttccaggttccactggtgacgcggcccagccggccgaggtgcagctggtggagtctgggggaggcctggtca
agcctggggggtccctgagactctcctgtgcagcctctggattcaccttcagtggctatgccatgagctgggtccgccagg
ctccagggaaggggctggagtgggtctcaaccattagtagtggcggaacctacatatactaccccgactcagtgaagggcc
gattcaccatctccagagacaacgccaagaactcactgtatctgcaaatgaacagcctgagagccgaggacacggccgtgt
attactgtgcgagacttgggggggataattactacgaatacttcgatgtctggggcaaagggaccacggtcaccgtctcct
ccgcctccaccaagggcccatcggtcttccccctggcgccctgctccaggagcacctccgagagcacagccgccctgggct
gcctggtcaaggactacttccccgaaccggtgacggtgtcgtggaactcaggcgctctgacca
pSEC Tag2 overlapping sequence:
(DNA)
(SEQ ID NO: 166)
tgctctgggttccaggttccactggtgacgc
Human IgG2 constant region overlapping sequence:
(DNA)
(SEQ ID NO: 167)
gacggtgtcgtggaactcaggcgctctgacca
Mouse C2 light chain variable region sequence:
(DNA)
(SEQ ID NO: 168)
gacattgtgatcacacagtctacagcttccttaggtgtatctctggggcagagggccaccatctcatgcagggccagcaaa
agtgtcagtacatctggctatagttatatgcactggtaccaacagagaccaggacagccacccaaactcctcatctatctt
gcatccaacctagaatctggggtccctgccaggttcagtggcagtgggtctgggacagacttcaccctcaacatccatcct
gtggaggaggaggatgctgcaacctattactgtcagcacagtagggagcttccgttcacgttcggaggggggaccaagctg
gagataaaacgggctgatgctgcaccaactgtatcc
(amino acids)
(SEQ ID NO: 169)
DIVITQSTASLGVSLGQRATISCRASKSVSTSGYSYMHWYQQRPGQPPKLLIYLASNLESGVPARFSGSGSGTDFTLNIHP
VEEEDAATYYCQHSRELPFTFGGGTKLEIKRADAAPTVS
Mouse C2 light chain variable framework region 1 (FWR1) sequence:
(DNA)
(SEQ ID NO: 170)
gacattgtgatcacacagtctacagcttccttaggtgtatctctggggcagagggccaccatctcatgc
(amino acids)
(SEQ ID NO: 171)
DIVITQSTASLGVSLGQRATISC
Mouse C2 light chain variable complementarity determining regions 1 (CDR1)
sequence:
(DNA)
(SEQ ID NO: 172)
agggccagcaaaagtgtcagtacatctggctatagttatatgcac
(amino acids)
(SEQ ID NO: 173)
RASKSVSTSGYSYMH
Mouse C2 light chain variable framework region 2 (FWR2) sequence:
(DNA)
(SEQ ID NO: 174)
tggtaccaacagagaccaggacagccacccaaactcctcatctat
(amino acids)
(SEQ ID NO: 175)
WYQQRPGQPPKLLIY
Mouse C2 light chain variable complementarity determining regions 2 (CDR2)
sequence:
(DNA)
(SEQ ID NO: 176)
cttgcatccaacctagaatc
(amino acids)
(SEQ ID NO: 177)
LASNLES
Mouse C2 light chain variable framework region 3 (FWR3) sequence:
(DNA)
(SEQ ID NO: 178)
tggggtccctgccaggttcagtggcagtgggtctgggacagacttcaccctcaacatccatcctgtggaggaggaggatgc
tgcaacctattactgt
(amino acids)
(SEQ ID NO: 179)
GVPARFSGSGSGTDFTLNIHPVEEEDAATYYC
Mouse C2 light chain variable complementarity determining regions 3 (CDR3)
sequence:
(DNA)
(SEQ ID NO: 180)
cagcacagtagggagcttccgttcacg
(amino acids)
(SEQ ID NO: 181)
QHSRELPFT
IGKV7-3*01 light chain variable region sequence:
(DNA)
(SEQ ID NO: 182)
gacattgtgctgacccagtctccagcctccttggccgtgtctccaggacagagggccaccatcacctgcagagccagtgag
agtgtcagtttcttgggaataaacttaattcactggtatcagcagaaaccaggacaacctcctaaactcctgatttaccaa
gcatccaataaagacactggggtcccagccaggttcagcggcagtgggtctgggaccgatttcaccctcacaattaatcct
gtggaagctaatgatactgcaaattattactgtctgcagagtaagaattttcctcccaca
(amino acid)
(SEQ ID NO: 183)
DIVLTQSPASLAVSPGQRATITCRASESVSFLGINLIHWYQQKPGQPPKLLIYQASNKDTGVPARFSGSGSGTDFTLTINP
VEANDTANYYCLQSKNFPPT
IGKV7-3*01 light chain variable framework region 1 (FWR1) sequence:
(DNA)
(SEQ ID NO: 184)
gacattgtgctgacccagtctccagcctccttggccgtgtctccaggacagagggccaccatcacctgc
(amino acids)
(SEQ ID NO: 185)
DIVLTQSPASLAVSPGQRATITC
IGKV7-3*01 light chain variable complementarity determining regions 1 (CDR1)
sequence:
(DNA)
(SEQ ID NO: 186)
agagccagtgagagtgtcagtttcttgggaataaacttaattcac
(amino acids)
(SEQ ID NO: 187)
RASESVSFLGINLIH
IGKV7-3*01 light chain variable framework region 2 (FWR2) sequence:
(DNA)
(SEQ ID NO: 188)
tggtatcagcagaaaccaggacaacctcctaaactcctgatttac
(amino acids)
(SEQ ID NO: 189)
WYQQKPGQPPKLLIY
IGKV7-3*01 light chain variable complementarity determining regions 2 (CDR2)
sequence:
(DNA)
(SEQ ID NO: 190)
caagcatccaataaagacact
(amino acids)
(SEQ ID NO: 191)
QASNKDT
IGKV7-3*01 light chain variable framework region 3 (FWR3) sequence:
(DNA)
(SEQ ID NO: 192)
ggggtcccagccaggttcagcggcagtgggtctgggaccgatttcaccctcacaattaatcctgtggaagctaatgatact
gcaaattattactgt
(amino acids)
(SEQ ID NO: 193)
GVPARFSGSGSGTDFTLTINPVEANDTANYYC
Humanized C2 light chain variable region sequence:
(DNA)
(SEQ ID NO: 194)
gacattgtgctgacccagtctccagcctccttggccgtgtctccaggacagagggccaccatcacctgcagagccagtaag
agtgtcagtaccagcggatactcctacatgcactggtatcagcagaaaccaggacaacctcctaaactcctgatttacctg
gcatccaatctggagagcggggtcccagccaggttcagcggcagtgggtctgggaccgatttcaccctcacaattaatcct
gtggaagctaatgatactgcaaattattactgtcagcacagtagggagctgcctttcacattcggcggagggaccaaggtg
gagatcaaacgaact
(amino acids)
(SEQ ID NO: 195)
DIVLTQSPASLAVSPGQRATITCRASKSVSTSGYSYMHWYQQKPGQPPKLLIYLASNLESGVPARFSGSGSGTDFTLTINP
VEANDTANYYCQHSRELPFTFGGGTKVEIKRT
Humanized C2 light chain variable framework region 1 (FWR1) acid sequence:
(DNA)
(SEQ ID NO: 196)
gacattgtgctgacccagtctccagcctccttggccgtgtctccaggacagagggccaccatcacctgc
(amino acids)
(SEQ ID NO: 197)
DIVLTQSPASLAVSPGQRATITC
Humanized C2 light chain variable complementarity determining regions 1 (CDR1)
sequence:
(DNA)
(SEQ ID NO: 198)
agagccagtaagagtgtcagtaccagcggatactcctacatgcac
(amino acids)
(SEQ ID NO: 199)
RASKSVSTSGYSYMH
Humanized C2 heavy light variable framework region 2 (FWR2) acid sequence:
(DNA)
(SEQ ID NO: 200)
tggtatcagcagaaaccaggacaacctcctaaactcctgatttac
(amino acids)
(SEQ ID NO: 201)
WYQQKPGQPPKLLIY
Humanized C2 light chain variable complementarity determining regions 2 (CDR2)
sequence:
(DNA)
(SEQ ID NO: 202)
ctggcatccaatctggagagc
(amino acids)
(SEQ ID NO: 203)
LASNLES
Humanized C2 light chain variable framework region 3 (FWR3) acid sequence:
(DNA)
(SEQ ID NO: 204)
ggggtcccagccaggttcagcggcagtgggtctgggaccgatttcaccctcacaattaatcctgtggaagctaatgatact
gcaaattattactgt
(amino acids)
(SEQ ID NO: 205)
GVPARFSGSGSGTDFTLTINPVEANDTANYYC
Humanized C2 light chain variable complementarity determining regions 3 (CDR3)
sequence:
(DNA)
(SEQ ID NO: 206)
cagcacagtagggagctgcctttcaca
(amino acids)
(SEQ ID NO: 207)
QHSRELPFT
Humanized C2 light chain variable complementarity determining regions 3 (CDR3)
sequence:
(DNA)
(SEQ ID NO: 208)
ctgcagagtaagaattttcctcccaca
(amino acids)
(SEQ ID NO: 209)
LQSKNFPPT
Humanized C2 gBLOCK#6 sequence (Kappa light chain in pCDNA3.1 V5):
(DNA)
(SEQ ID NO: 210)
actcactatagggagacccaagctggctagttaagcttgggccaccatggagacagacacactcctgctatgggtactgct
gctctgggttccaggttccactggtgacgacattgtgctgacccagtctccagcctccttggccgtgtctccaggacagag
ggccaccatcacctgcagagccagtaagagtgtcagtaccagcggatactcctacatgcactggtatcagcagaaaccagg
acaacctcctaaactcctgatttacctggcatccaatctggagagcggggtcccagccaggttcagcggcagtgggtctgg
gaccgatttcaccctcacaattaatcctgtggaagctaatgatactgcaaattattactgtcagcacagtagggagctgcc
tttcacattcggcggagggaccaaggtggagatcaaacgaactacggtggctgcaccatctgtcttcatcttcccgccatc
tgatgagcagttgaaatctggaactgcctctgttgtgtgcctgctgaataacttctatcccagagaggccaaagtacagtg
gaaggtggataacgccctccaatcgggtaactcccaggagagtgtcacagagcaggacagcaaggacagcacctacagcct
cagcagcaccctgacgctgagcaaagcagactacgagaaacacaaagtctacgcctgcgaagtcacccatcagggcctgag
ctcgcccgtcacaaagagcttcaacaggggagagtgttagtaagtttaaacccgctgatcagcctcgactgtgccttctag
ttg
pCDNA3.1 V5 5′ overlapping sequence:
(DNA)
(SEQ ID NO: 211)
actcactatagggagacccaagctggctagtt
pCDNA3.1 V5 3′ overlapping sequence:
(DNA)
(SEQ ID NO: 212)
ccgctgatcagcctcgactgtgccttctagttg
Humanized C2 gBLOCK#7 sequence (Kappa light chain in pSEC Tag2):
(DNA)
(SEQ ID NO: 213)
tgctctgggttccaggttccactggtgacgcggcccagccggccgacattgtgctgacccagtctccagcctccttggccg
tgtctccaggacagagggccaccatcacctgcagagccagtaagagtgtcagtaccagcggatactcctacatgcactggt
atcagcagaaaccaggacaacctcctaaactcctgatttacctggcatccaatctggagagcggggtcccagccaggttca
gcggcagtgggtctgggaccgatttcaccctcacaattaatcctgtggaagctaatgatactgcaaattattactgtcagc
acagtagggagctgcctttcacattcggcggagggaccaaggtggagatcaaacgaactacggtggctgcaccatctgtct
tcatcttcccgccatctgatgagcagttgaaatctggaactgcctctgttgtgtgcctgctgaataacttctatcccagag
aggccaaagtacagtggaaggtggataacgccctccaatcgggtaactcccaggagagtgtcacagagcaggacagcaagg
acagcacctacagcctcagcagcaccctgacgctgagcaaagcagactacgagaaacacaaagtctacgcctgcgaagtca
cccatcagggcctgagctcgcccgtcacaaagagcttcaacaggggagagtgttagtaagtttaaacccgctgatcagcct
cgactgtgccttctagttg
pSEC Tag2 5′ overlapping sequence:
(DNA)
(SEQ ID NO: 214)
tgctctgggttccaggttccactggtgacgc
pSEC Tag2 3′ overlapping sequence:
(DNA)
(SEQ ID NO: 215)
ccgctgatcagcctcgactgtgccttctagttg
Humanized C2 gBLOCK#8 sequence (lambda light chain in pCDNA3.1 V5):
(DNA)
(SEQ ID NO: 216)
actcactatagggagacccaagctggctagttaagcttgggccaccatggagacagacacactcctgctatgggtactgct
gctctgggttccaggttccactggtgacgacattgtgctgacccagtctccagcctccttggccgtgtctccaggacagag
ggccaccatcacctgcagagccagtaagagtgtcagtaccagcggatactcctacatgcactggtatcagcagaaaccagg
acaacctcctaaactcctgatttacctggcatccaatctggagagcggggtcccagccaggttcagcggcagtgggtctgg
gaccgatttcaccctcacaattaatcctgtggaagctaatgatactgcaaattattactgtcagcacagtagggagctgcc
tttcacattcggcggagggaccaaggtggagatcaaacgaactggtcagcccaaggctgccccctcggtcactctgttccc
gccctcctctgaggagcttcaagccaacaaggccacactggtgtgtctcataagtgacttctacccgggagccgtgacagt
ggcctggaaggcagatagcagccccgtcaaggcgggagtggagaccaccacaccctccaaacaaagcaacaacaagtacgc
ggccagcagctatctgagcctgacgcctgagcagtggaagtcccacagaagctacagctgccaggtcacgcatgaagggag
caccgtggagaagacagtggcccctacagaatgttcatagtaagtttaaacccgctgatcagcctcgactgtgccttctag
ttg
pCDNA3.1 V5 5′ overlapping sequence:
(DNA)
(SEQ ID NO: 217)
actcactatagggagacccaagctggctagtt
pCDNA3.1 V5 3′ overlapping sequence:
(DNA)
(SEQ ID NO: 218)
ccgctgatcagcctcgactgtgccttctagttg
Humanized C2 gBLOCK#9 sequence (lambda light chain in pSEC Tag2):
(DNA)
(SEQ ID NO: 219)
tgctctgggttccaggttccactggtgacgcggcccagccggccgacattgtgctgacccagtctccagcctccttggccg
tgtctccaggacagagggccaccatcacctgcagagccagtaagagtgtcagtaccagcggatactcctacatgcactggt
atcagcagaaaccaggacaacctcctaaactcctgatttacctggcatccaatctggagagcggggtcccagccaggttca
gcggcagtgggtctgggaccgatttcaccctcacaattaatcctgtggaagctaatgatactgcaaattattactgtcagc
acagtagggagctgcctttcacattcggcggagggaccaaggtggagatcaaacgaactggtcagcccaaggctgccccct
cggtcactctgttcccgccctcctctgaggagcttcaagccaacaaggccacactggtgtgtctcataagtgacttctacc
cgggagccgtgacagtggcctggaaggcagatagcagccccgtcaaggcgggagtggagaccaccacaccctccaaacaaa
gcaacaacaagtacgcggccagcagctatctgagcctgacgcctgagcagtggaagtcccacagaagctacagctgccagg
tcacgcatgaagggagcaccgtggagaagacagtggcccctacagaatgttcatagtaagtttaaacccgctgatcagcct
cgactgtgccttctagttg
pSEC Tag2 5′ overlapping sequence:
(DNA)
(SEQ ID NO: 220)
tgctctgggttccaggttccactggtgacgc
pSEC Tag2 3′ overlapping sequence:
(DNA)
(SEQ ID NO: 221)
ccgctgatcagcctcgactgtgccttctagttg
Murine Ig kappa chain leader sequence
(DNA)
(SEQ ID NO: 222)
atggagacagacacactcctgctatgggtactgctgctctgggttccaggttccactggtgac
(amino acids)
(SEQ ID NO: 223)
METDTLLLWVLLLWVPGSTGD
Interleukin-2 (IL-2) leader sequence
(DNA)
(SEQ ID NO: 224)
atgtacaggatgcaactcctgtcttgcattgcactaagtcttgcacttgtcacaaacagt
(amino acids)
(SEQ ID NO: 225)
MYRMQLLSCIALSLALVTNS
CD33 leader sequence
(DNA)
(SEQ ID NO: 226)
atgcctcttctgcttctgcttcctctgctttgggctggagctcttgct
(amino acids)
(SEQ ID NO: 227)
MPLLLLLPLLWAGALA
IGHV3-21*03 leader sequence
(DNA)
(SEQ ID NO: 228)
atggaactggggctccgctgggttttccttgttgctattttagaaggtgtccagtgt
(amino acids)
(SEQ ID NO: 229)
MELGLRWVFLVAILEGVQC
IGHV3-11*02 leader sequence
(DNA)
(SEQ ID NO: 230)
atggaagccccagcgcagcttctcttcctcctgctactctggctcccagataccactgga
(amino acids)
(SEQ ID NO: 231)
MEAPAQLLFLLLLWLPDTTG
Humanized E6 single chain GS3
(DNA)
(SEQ ID NO: 232)
gaggtgcagctggtggagtctgggggaggcctggtcaagcctggggggtccctgagactctcctgtgcagcctctggattc
accttcagtaggtatggcatgagctgggtccgccaggctccagggaagaggctggagtgggtctcaaccattagtggcgga
ggcacctacatatactacccagactcagtgaagggccgattcaccatctccagagacaacgccaagaacaccctgtatctg
caaatgaacagcctgagagccgaggacacggctgtgtattactgtaccagagataactatggccgcaactatgattatggc
atggattattggggccagggcaccctggtgaccgtgagcagcggcggtggcggatccggcggtggcggatccggcggtggc
ggatccgaaattgtgttgacacagtctccagccaccctgtctttgtctccaggggaaagagccaccctcacctgcagcgcc
accagcagtgttagctacatccactggtaccaacagaggcctggccagagccccaggctcctcatctatagcacctccaac
ctggccagcggcatcccagccaggttcagtggcagtgggtctgggagcgactacactctcaccatcagcagcctagagcct
gaagattttgcagtttattactgtcagcagcgtagcagctcccctttcacctttggcagcggcaccaaagtggaaattaaa
(amino acids)
(SEQ ID NO: 233)
EVQLVESGGGLVKPGGSLRLSCAASGFTFSRYGMSWVRQAPGKRLEWVSTISGGGTYIYYPDSVKGRFTISRDNAKNTLY
LQMNSLRAEDTAVYYCTRDNYGRNYDYGMDYWGQGTLVTVSSGGGGSGGGGSGGGGSEIVLTQSPATLSLSPGERATLTC
SATSSVSYIHWYQQRPGQSPRLLIYSTSNLASGIPARFSGSGSGSDYTLTISSLEPEDFAVYYCQQRSSSPFTFGSGTKV
EIK
Humanized E6 single chain IgGlnoC
(DNA)
(SEQ ID NO: 234)
gaggtgcagctggtggagtctgggggaggcctggtcaagcctggggggtccctgagactctcctgtgcagcctctggattc
accttcagtaggtatggcatgagctgggtccgccaggctccagggaagaggctggagtgggtctcaaccattagtggcgga
ggcacctacatatactacccagactcagtgaagggccgattcaccatctccagagacaacgccaagaacaccctgtatctg
caaatgaacagcctgagagccgaggacacggctgtgtattactgtaccagagataactatggccgcaactatgattatggc
atggattattggggccagggcaccctggtgaccgtgagcagcgataaaacccatactaaaccgccaaaaccggcgccggaa
ctgctgggtggtcctggtaccggtgaaattgtgttgacacagtctccagccaccctgtctttgtctccaggggaaagagcc
accctcacctgcagcgccaccagcagtgttagctacatccactggtaccaacagaggcctggccagagccccaggctcctc
atctatagcacctccaacctggccagcggcatcccagccaggttcagtggcagtgggtctgggagcgactacactctcacc
atcagcagcctagagcctgaagattttgcagtttattactgtcagcagcgtagcagctcccctttcacctttggcagcggc
accaaagtggaaattaaa
(amino acids)
(SEQ ID NO: 235)
EVQLVESGGGLVKPGGSLRLSCAASGFTFSRYGMSWVRQAPGKRLEWVSTISGGGTYIYYPDSVKGRFTISRDNAKNTLY
LQMNSLRAEDTAVYYCTRDNYGRNYDYGMDYWGQGTLVTVSSDKTHTKPPKPAPELLGGPGTGEIVLTQSPATLSLSPGE
RATLTCSATSSVSYIHWYQQRPGQSPRLLIYSTSNLASGIPARFSGSGSGSDYTLTISSLEPEDFAVYYCQQRSSSPFTF
GSGTKVEIK
Humanized E6 single chain X4 (linker is IgG1 and IgG2 modified hinge region)
(DNA)
(SEQ ID NO: 236)
gaggtgcagctggtggagtctgggggaggcctggtcaagcctggggggtccctgagactctcctgtgcagcctctggattc
accttcagtaggtatggcatgagctgggtccgccaggctccagggaagaggctggagtgggtctcaaccattagtggcgga
ggcacctacatatactacccagactcagtgaagggccgattcaccatctccagagacaacgccaagaacaccctgtatctg
caaatgaacagcctgagagccgaggacacggctgtgtattactgtaccagagataactatggccgcaactatgattatggc
atggattattggggccagggcaccctggtgaccgtgagcagcgataaaacccatactaaaccgccaaaaccggcgccggaa
ctgctgggtggtcctggtaccggtactggtggtccgactattaaacctccgaaacctccgaaacctgctccgaacctgctg
ggtggtccggaaattgtgttgacacagtctccagccaccctgtctttgtctccaggggaaagagccaccctcacctgcagc
gccaccagcagtgttagctacatccactggtaccaacagaggcctggccagagccccaggctcctcatctatagcacctcc
aacctggccagcggcatcccagccaggttcagtggcagtgggtctgggagcgactacactctcaccatcagcagcctagag
cctgaagattttgcagtttattactgtcagcagcgtagcagctcccctttcacctttggcagcggcaccaaagtggaaatt
aaa
(amino acids)
(SEQ ID NO: 237)
EVQLVESGGGLVKPGGSLRLSCAASGFTFSRYGMSWVRQAPGKRLEWVSTISGGGTYIYYPDSVKGRFTISRDNAKNTLY
LQMNSLRAEDTAVYYCTRDNYGRNYDYGMDYWGQGTLVTVSSDKTHTKPPKPAPELLGGPGTGTGGPTIKPPKPPKPAPN
LLGGPEIVLTQSPATLSLSPGERATLTCSATSSVSYIHWYQQRPGQSPRLLIYSTSNLASGIPARFSGSGSGSDYTLTIS
SLEPEDFAVYYCQQRSSSPFTFGSGTKVEIK
Humanized C2 single chain GS3
(DNA)
(SEQ ID NO: 238)
gaggtgcagctggtggagtctgggggaggcctggtcaagcctggggggtccctgagactctcctgtgcagcctctggattc
accttcagtggctatgccatgagctgggtccgccaggctccagggaaggggctggagtgggtctcaaccattagtagtggc
ggaacctacatatactaccccgactcagtgaagggccgattcaccatctccagagacaacgccaagaactcactgtatctg
caaatgaacagcctgagagccgaggacacggccgtgtattactgtgcgagacttgggggggataattactacgaatacttc
gatgtctggggcaaagggaccacggtcaccgtctcctccggcggtggcggatccggcggtggcggatccggcggtggcgga
tccgacattgtgctgacccagtctccagcctccttggccgtgtctccaggacagagggccaccatcacctgcagagccagt
aagagtgtcagtaccagcggatactcctacatgcactggtatcagcagaaaccaggacaacctcctaaactcctgatttac
ctggcatccaatctggagagcggggtcccagccaggttcagcggcagtgggtctgggaccgatttcaccctcacaattaat
cctgtggaagctaatgatactgcaaattattactgtcagcacagtagggagctgcctttcacattcggcggagggaccaag
gtggagatcaaacgaact
(amino acids)
(SEQ ID NO: 239)
EVQLVESGGGLVKPGGSLRLSCAASGFTFSGYAMSWVRQAPGKGLEWVSTISSGGTYIYYPDSVKGRFTISRDNAKNSLY
LQMNSLRAEDTAVYYCARLGGDNYYEYFDVWGKGTTVTVSSGGGGSGGGGSGGGGSDIVLTQSPASLAVSPGQRATITCR
ASKSVSTSGYSYMHWYQQKPGQPPKLLIYLASNLESGVPARFSGSGSGTDFTLTINPVEANDTANYYCQHSRELPFTFGG
GTKVEIKRT
Humanized C2 single chain IgG (no Cysteine)
(DNA)
(SEQ ID NO: 240)
gaggtgcagctggtggagtctgggggaggcctggtcaagcctggggggtccctgagactctcctgtgcagcctctggattc
accttcagtggctatgccatgagctgggtccgccaggctccagggaaggggctggagtgggtctcaaccattagtagtggc
ggaacctacatatactaccccgactcagtgaagggccgattcaccatctccagagacaacgccaagaactcactgtatctg
caaatgaacagcctgagagccgaggacacggccgtgtattactgtgcgagacttgggggggataattactacgaatacttc
gatgtctggggcaaagggaccacggtcaccgtctcctccgataaaacccatactaaaccgccaaaaccggcgccggaactg
ctgggtggtcctggtaccggtgacattgtgctgacccagtctccagcctccttggccgtgtctccaggacagagggccacc
atcacctgcagagccagtaagagtgtcagtaccagcggatactcctacatgcactggtatcagcagaaaccaggacaacct
cctaaactcctgatttacctggcatccaatctggagagcggggtcccagccaggttcagcggcagtgggtctgggaccgat
ttcaccctcacaattaatcctgtggaagctaatgatactgcaaattattactgtcagcacagtagggagctgcctttcaca
ttcggcggagggaccaaggtggagatcaaacgaact
(amino acids)
(SEQ ID NO: 241)
EVQLVESGGGLVKPGGSLRLSCAASGFTFSGYAMSWVRQAPGKGLEWVSTISSGGTYIYYPDSVKGRFTISRDNAKNSLY
LQMNSLRAEDTAVYYCARLGGDNYYEYFDVWGKGTTVTVSSDKTHTKPPKPAPELLGGPGTGDIVLTQSPASLAVSPGQR
ATITCRASKSVSTSGYSYMHWYQQKPGQPPKLLIYLASNLESGVPARFSGSGSGTDFTLTINPVEANDTANYYCQHSREL
PFTFGGGTKVEIKRT
Humanized C2 single chain X4 (linker is IgG1 and IgG2 modified hinge region)
(DNA)
(SEQ ID NO: 242)
gaggtgcagctggtggagtctgggggaggcctggtcaagcctggggggtccctgagactctcctgtgcagcctctggattc
accttcagtggctatgccatgagctgggtccgccaggctccagggaaggggctggagtgggtctcaaccattagtagtggc
ggaacctacatatactaccccgactcagtgaagggccgattcaccatctccagagacaacgccaagaactcactgtatctg
caaatgaacagcctgagagccgaggacacggccgtgtattactgtgcgagacttgggggggataattactacgaatacttc
gatgtctggggcaaagggaccacggtcaccgtctcctccgataaaacccatactaaaccgccaaaaccggcgccggaactg
ctgggtggtcctggtaccggtactggtggtccgactattaaacctccgaaacctccgaaacctgctccgaacctgctgggt
ggtccggacattgtgctgacccagtctccagcctccttggccgtgtctccaggacagagggccaccatcacctgcagagcc
agtaagagtgtcagtaccagcggatactcctacatgcactggtatcagcagaaaccaggacaacctcctaaactcctgatt
tacctggcatccaatctggagagcggggtcccagccaggttcagcggcagtgggtctgggaccgatttcaccctcacaatt
aatcctgtggaagctaatgatactgcaaattattactgtcagcacagtagggagctgcctttcacattcggcggagggacc
aaggtggagatcaaacgaact
(amino acids)
(SEQ ID NO: 243)
EVQLVESGGGLVKPGGSLRLSCAASGFTFSGYAMSWVRQAPGKGLEWVSTISSGGTYIYYPDSVKGRFTISRDNAKNSLY
LQMNSLRAEDTAVYYCARLGGDNYYEYFDVWGKGTTVTVSSDKTHTKPPKPAPELLGGPGTGTGGPTIKPPKPPKPAPNL
LGGPDIVLTQSPASLAVSPGQRATITCRASKSVSTSGYSYMHWYQQKPGQPPKLLIYLASNLESGVPARFSGSGSGTDFT
LTINPVEANDTANYYCQHSRELPFTFGGGTKVEIKRT
Humanized C3 single chain GS3
(DNA)
(SEQ ID NO: 244)
caggttcagctggtgcagtctggagctgaggtgaagaagcctggggcctcagtgaaggtctcctgcaaggcttctggttac
acctttaccgactacgccatgaactgggtgcgacaggcccctggacaagggcttgagtggatgggagtgatcagcaccttc
agcggtaacacaaacttcaaccagaagttcaagggcagagtcaccatgaccacagacacatccacgagcacagcctacatg
gagctgaggagcctgagatctgacgacacggccgtgtattactgtgcgagaagcgactactacggcccatacttcgactac
tggggccagggcaccaccctgaccgtgtccagcggcggtggcggatccggcggtggcggatccggcggtggcggatccgat
attgtgatgacccagactccactctctctgtccgtcacccctggacagccggcctccatctcctgcaggtctagtcagacc
attgtccatagtaatggaaacacctatttggagtggtacctgcagaagccaggccagtctccacagctcctgatctataag
gtttccaaccggttctctggagtgccagataggttcagtggcagcgggtcagggacagatttcacactgaaaatcagccgg
gtggaggctgaggatgttggggtttattactgcttccaaggtagccacgtgcctttcaccttcggcggagggaccaaggtg
gagatcaaacgaact
(amino acids)
(SEQ ID NO: 245)
QVQLVQSGAEVKKPGASVKVSCKASGYTFTDYAMNWVRQAPGQGLEWMGVISTFSGNTNFNQKFKGRVTMTTDTSTSTAYM
ELRSLRSDDTAVYYCARSDYYGPYFDYWGQGTTLTVSSGGGGSGGGGSGGGGSDIVMTQTPLSLSVTPGQPASISCRSSQ
TIVHSNGNTYLEWYLQKPGQSPQLLIYKVSNRFSGVPDRFSGSGSGTDFTLKISRVEAEDVGVYYCFQGSHVPFTFGGGT
KVEIKRT
Humanized C3 single chain IgG1 (no Cysteine)
(DNA)
(SEQ ID NO: 246)
caggttcagctggtgcagtctggagctgaggtgaagaagcctggggcctcagtgaaggtctcctgcaaggcttctggttac
acctttaccgactacgccatgaactgggtgcgacaggcccctggacaagggcttgagtggatgggagtgatcagcaccttc
agcggtaacacaaacttcaaccagaagttcaagggcagagtcaccatgaccacagacacatccacgagcacagcctacatg
gagctgaggagcctgagatctgacgacacggccgtgtattactgtgcgagaagcgactactacggcccatacttcgactac
tggggccagggcaccaccctgaccgtgtccagcgataaaacccatactaaaccgccaaaaccggcgccggaactgctgggt
ggtcctggtaccggtgatattgtgatgacccagactccactctctctgtccgtcacccctggacagccggcctccatctcc
tgcaggtctagtcagaccattgtccatagtaatggaaacacctatttggagtggtacctgcagaagccaggccagtctcca
cagctcctgatctataaggtttccaaccggttctctggagtgccagataggttcagtggcagcgggtcagggacagatttc
acactgaaaatcagccgggtggaggctgaggatgttggggtttattactgcttccaaggtagccacgtgcctttcaccttc
ggcggagggaccaaggtggagatcaaacgaact
(amino acids)
(SEQ ID NO: 247)
QVQLVQSGAEVKKPGASVKVSCKASGYTFTDYAMNWVRQAPGQGLEWMGVISTFSGNTNFNQKFKGRVTMTTDTSTSTAYM
ELRSLRSDDTAVYYCARSDYYGPYFDYWGQGTTLTVSSDKTHTKPPKPAPELLGGPGTGDIVMTQTPLSLSVTPGQPASI
SCRSSQTIVHSNGNTYLEWYLQKPGQSPQLLIYKVSNRFSGVPDRFSGSGSGTDFTLKISRVEAEDVGVYYCFQGSHVPF
TFGGGTKVEIKRT
Humanized C3 single chain X4 (linker is IgG1 and IgG2 modified hinge region)
(DNA)
(SEQ ID NO: 248)
caggttcagctggtgcagtctggagctgaggtgaagaagcctggggcctcagtgaaggtctcctgcaaggcttctggttac
acctttaccgactacgccatgaactgggtgcgacaggcccctggacaagggcttgagtggatgggagtgatcagcaccttc
agcggtaacacaaacttcaaccagaagttcaagggcagagtcaccatgaccacagacacatccacgagcacagcctacatg
gagctgaggagcctgagatctgacgacacggccgtgtattactgtgcgagaagcgactactacggcccatacttcgactac
tggggccagggcaccaccctgaccgtgtccagcgataaaacccatactaaaccgccaaaaccggcgccggaactgctgggt
ggtcctggtaccggtactggtggtccgactattaaacctccgaaacctccgaaacctgctccgaacctgctgggtggtccg
gatattgtgatgacccagactccactctctctgtccgtcacccctggacagccggcctccatctcctgcaggtctagtcag
accattgtccatagtaatggaaacacctatttggagtggtacctgcagaagccaggccagtctccacagctcctgatctat
aaggtttccaaccggttctctggagtgccagataggttcagtggcagcgggtcagggacagatttcacactgaaaatcagc
cgggtggaggctgaggatgttggggtttattactgcttccaaggtagccacgtgcctttcaccttcggcggagggaccaag
gtggagatcaaacgaact
(amino acids)
(SEQ ID NO: 249)
QVQLVQSGAEVKKPGASVKVSCKASGYTFTDYAMNWVRQAPGQGLEWMGVISTFSGNTNFNQKFKGRVTMTTDTSTSTAYM
ELRSLRSDDTAVYYCARSDYYGPYFDYWGQGTTLTVSSDKTHTKPPKPAPELLGGPGTGTGGPTIKPPKPPKPAPNLLGG
PDIVMTQTPLSLSVTPGQPASISCRSSQTIVHSNGNTYLEWYLQKPGQSPQLLIYKVSNRFSGVPDRFSGSGSGTDFTLK
ISRVEAEDVGVYYCFQGSHVPFTFGGGTKVEIKRT
Humanized C8 single chain GS3 (linker is [Gly₄Ser₁]₃)
(DNA)
(SEQ ID NO: 250)
gaggtgcagctggtggagtctgggggaggcctggtcaagcctggggggtccctgagactctcctgtgcagcctctggattc
accttcagtggctatgccatgagctgggtccgccaggctccagggaaggggctggagtgggtctcaaccattagtagtggc
ggaacctacatatactaccctgactcagtgaagggccgattcaccatctccagagacaacgccaagaactcactgtatctg
caaatgaacagcctgagagccgaggacacggccgtgtattactgtgcgagactgggcggcgataactattatgaatattgg
ggcaaagggaccacggtcaccgtctcctccggcggtggcggatccggcggtggcggatccggcggtggcggatccgacatc
gtgatgacccagtctccagactccctggctgtgtctctgggcgagagggccaccatcaactgcagggccagcaagagtgtt
agcaccagcggctacagctacatgcactggtaccagcagaaaccaggacagcctcctaagctgctcatttacctggtgtct
aacctggaatccggggtccctgaccgattcagtggcagcgggtctgggacagatttcactctcaccatcagcagcctgcag
gctgaagatgtggcagtttattactgtcaacacattcgggaactgaccaggagtgaattcggcggagggaccaaggtggag
atcaaacgaact
(amino acids)
(SEQ ID NO: 251)
EVQLVESGGGLVKPGGSLRLSCAASGFTFSGYAMSWVRQAPGKGLEWVSTISSGGTYIYYPDSVKGRFTISRDNAKNSLY
LQMNSLRAEDTAVYYCARLGGDNYYEYWGKGTTVTVSSGGGGSGGGGSGGGGSDIVMTQSPDSLAVSLGERATINCRASK
SVSTSGYSYMHWYQQKPGQPPKLLIYLVSNLESGVPDRFSGSGSGTDFTLTISSLQAEDVAVYYCQHIRELTRSEFGGGT
KVEIKRT
Humanized C8 single chain IgG1 (no Cysteine)
(DNA)
(SEQ ID NO: 252)
gaggtgcagctggtggagtctgggggaggcctggtcaagcctggggggtccctgagactctcctgtgcagcctctggattc
accttcagtggctatgccatgagctgggtccgccaggctccagggaaggggctggagtgggtctcaaccattagtagtggc
ggaacctacatatactaccctgactcagtgaagggccgattcaccatctccagagacaacgccaagaactcactgtatctg
caaatgaacagcctgagagccgaggacacggccgtgtattactgtgcgagactgggcggcgataactattatgaatattgg
ggcaaagggaccacggtcaccgtctcctccgataaaacccatactaaaccgccaaaaccggcgccggaactgctgggtggt
cctggtaccggtgacatcgtgatgacccagtctccagactccctggctgtgtctctgggcgagagggccaccatcaactgc
agggccagcaagagtgttagcaccagcggctacagctacatgcactggtaccagcagaaaccaggacagcctcctaagctg
ctcatttacctggtgtctaacctggaatccggggtccctgaccgattcagtggcagcgggtctgggacagatttcactctc
accatcagcagcctgcaggctgaagatgtggcagtttattactgtcaacacattcgggaactgaccaggagtgaattcggc
ggagggaccaaggtggagatcaaacgaact
(amino acids)
(SEQ ID NO: 253)
EVQLVESGGGLVKPGGSLRLSCAASGFTFSGYAMSWVRQAPGKGLEWVSTISSGGTYIYYPDSVKGRFTISRDNAKNSLY
LQMNSLRAEDTAVYYCARLGGDNYYEYWGKGTTVTVSSDKTHTKPPKPAPELLGGPGTGDIVMTQSPDSLAVSLGERATI
NCRASKSVSTSGYSYMHWYQQKPGQPPKLLIYLVSNLESGVPDRFSGSGSGTDFTLTISSLQAEDVAVYYCQHIRELTRS
EFGGGTKVEIKRT
Humanized C8 single chain X4 (linker is IgG1 and IgG2 modified hinge region)
(DNA)
(SEQ ID NO: 254)
gaggtgcagctggtggagtctgggggaggcctggtcaagcctggggggtccctgagactctcctgtgcagcctctggattc
accttcagtggctatgccatgagctgggtccgccaggctccagggaaggggctggagtgggtctcaaccattagtagtggc
ggaacctacatatactacccagactcagtgaagggccgattcaccatctccagagacaacgccaagaactcactgtatctg
caaatgaacagcctgagagccgaggacacggccgtgtattactgtgcgagactgggcggcgacaattactatgagtattgg
ggcaaagggaccacggtcaccgtctcctccgataaaacccatactaaaccgccaaaaccggcgccggaactgctgggtggt
cctggtaccggtactggtggtccgactattaaacctccgaaacctccgaaacctgctccgaacctgctgggtggtccggac
atcgtgatgacccagtctccagactccctggctgtgtctctgggcgagagggccaccatcaactgcagggccagcaagagt
gttagcaccagcggctacagctacatgcactggtaccagcagaaaccaggacagcctcctaagctgctcatttacctggtg
tctaacctggaatccggggtccctgaccgattcagtggcagcgggtctgggacagatttcactctcaccatcagcagcctg
caggctgaagatgtggcagtttattactgtcaacacattcgggaactgaccaggagtgaattcggcggagggaccaaggtg
gagatcaaacgaact
(amino acids)
(SEQ ID NO: 255)
EVQLVESGGGLVKPGGSLRLSCAASGFTFSGYAMSWVRQAPGKGLEWVSTISSGGTYIYYPDSVKGRFTISRDNAKNSLY
LQMNSLRAEDTAVYYCARLGGDNYYEYWGKGTTVTVSSDKTHTKPPKPAPELLGGPGTGTGGPTIKPPKPPKPAPNLLGG
PDIVMTQSPDSLAVSLGERATINCRASKSVSTSGYSYMHWYQQKPGQPPKLLIYLVSNLESGVPDRFSGSGSGTDFTLTI
SSLQAEDVAVYYCQHIRELTRSEFGGGTKVEIKRT
pSECTag2 E6 scFV-FC
(DNA)
(SEQ ID NO: 256)
atggagacagacacactcctgctatgggtactgctgctctgggttccaggttccactggtgacgcggcccagccggccgag
gtgcagctggtggagtctgggggaggcctggtcaagcctggggggtccctgagactctcctgtgcagcctctggattcacc
ttcagtaggtatggcatgagctgggtccgccaggctccagggaagaggctggagtgggtctcaaccattagtggcggaggc
acctacatatactacccagactcagtgaagggccgattcaccatctccagagacaacgccaagaacaccctgtatctgcaa
atgaacagcctgagagccgaggacacggctgtgtattactgtaccagagataactatggccgcaactatgattatggcatg
gattattggggccagggcaccctggtgaccgtgagcagcggcggtggcggatccggcggtggcggatccggcggtggcgga
tccgaaattgtgttgacacagtctccagccaccctgtctttgtctccaggggaaagagccaccctcacctgcagcgccacc
agcagtgttagctacatccactggtaccaacagaggcctggccagagccccaggctcctcatctatagcacctccaacctg
gccagcggcatcccagccaggttcagtggcagtgggtctgggagcgactacactctcaccatcagcagcctagagcctgaa
gattttgcagtttattactgtcagcagcgtagcagctcccctttcacctttggcagcggcaccaaagtggaaattaaagag
cccaaatcttgtgacaaaactcacacatgcccaccgtgcccagcacctgaactcctggggggaccgtcagtcttcctcttc
cccccaaaacccaaggacaccctcatgatctcccggacccctgaggtcacatgcgtggtggtggacgtgagccacgaagac
cctgaggtcaagttcaactggtacgtggacggcgtggaggtgcataatgccaagacaaagccgcgggaggagcagtacaac
agcacgtaccgtgtggtcagcgtcctcaccgtcctgcaccaggactggctgaatggcaaggagtacaagtgcaaggtctcc
aacaaagccctcccagcccccatcgagaaaaccatctccaaagccaaagggcagccccgagaaccacaggtgtacaccctg
cccccatcccgggaggagatgaccaagaaccaggtcagcctgacctgcctggtcaaaggcttctatcccagcgacatcgcc
gtggagtgggagagcaatgggcagccggagaacaactacaagaccacgcctcccgtgctggactccgacggctccttcttc
ctctacagcaagctcaccgtggacaagagcaggtggcagcaggggaacgtcttctcatgctccgtgatgcatgaggctctg
cacaaccactacacgcagaagagcctctccctgtctccgggtaaatgataa
(amino acids)
(SEQ ID NO: 257)
METDTLLLWVLLLWVPGSTGDAAQPAEVQLVESGGGLVKPGGSLRLSCAASGFTFSRYGMSWVRQAPGKRLEWVSTISGG
GTYIYYPDSVKGRFTISRDNAKNTLYLQMNSLRAEDTAVYYCTRDNYGRNYDYGMDYWGQGTLVTVSSGGGGSGGGGSGG
GGSEIVLTQSPATLSLSPGERATLTCSATSSVSYIHWYQQRPGQSPRLLIYSTSNLASGIPARFSGSGSGSDYTLTISSL
EPEDFAVYYCQQRSSSPFTFGSGTKVEIKEPKSCDKTHTCPPCPAPELLGGPSVFLFPPKPKDTLMISRTPEVTCVVVDV
SHEDPEVKFNWYVDGVEVHNAKTKPREEQYNSTYRVVSVLTVLHQDWLNGKEYKCKVSNKALPAPIEKTISKAKGQPREP
QVYTLPPSREEMTKNQVSLTCLVKGFYPSDIAVEWESNGQPENNYKTTPPVLDSDGSFFLYSKLTVDKSRWQQGNVFSCS
VMHEALHNHYTQKSLSLSPGK**
E6 scFC-FC 1 gBLOCk sequence:
(SEQ ID NO: 258)
tgctctgggttccaggttccactggtgacgcggcccagccggccgaggtgcagctggtggagtctgggggaggcctggtca
agcctggggggtccctgagactctcctgtgcagcctctggattcaccttcagtaggtatggcatgagctgggtccgccagg
ctccagggaagaggctggagtgggtctcaaccattagtggcggaggcacctacatatactacccagactcagtgaagggcc
gattcaccatctccagagacaacgccaagaacaccctgtatctgcaaatgaacagcctgagagccgaggacacggctgtgt
attactgtaccagagataactatggccgcaactatgattatggcatggattattggggccagggcaccctggtgaccgtga
gcagcggcggtggcggatccggcggtggcggatccggcggtggcggatccgaaattgtgttgacacagtctccagccaccc
tgtctttgtc
E6 scFC-FC 2 gBLOCk sequence:
(SEQ ID NO: 259)
aattgtgttgacacagtctccagccaccctgtctttgtctccaggggaaagagccaccctcacctgcagcgccaccagcag
tgttagctacatccactggtaccaacagaggcctggccagagccccaggctcctcatctatagcacctccaacctggccag
cggcatcccagccaggttcagtggcagtgggtctgggagcgactacactctcaccatcagcagcctagagcctgaagattt
tgcagtttattactgtcagcagcgtagcagctcccctttcacctttggcagcggcaccaaagtggaaattaaagagcccaa
atcttgtgacaaaactcacacatgcccaccgtgcccagcacctgaactcctggggggaccgtcagtcttcctcttcccccc
aaaacccaaggacaccctcatgatctcccggacccctgaggtcacatgcgtggtggtggacgtgagccacgaagaccctga
ggtcaagttcaactggtacgtggacggcgtggaggtgcataatgccaagacaaagccgcgggaggagcagtacaacagcac
gtaccgtgtggtcagc
pSECTag2 C2 scFV-FC
(DNA)
(SEQ ID NO: 260)
atggagacagacacactcctgctatgggtactgctgctctgggttccaggttccactggtgacgcggcccagccggccgag
gtgcagctggtggagtctgggggaggcctggtcaagcctggggggtccctgagactctcctgtgcagcctctggattcacc
ttcagtggctatgccatgagctgggtccgccaggctccagggaaggggctggagtgggtctcaaccattagtagtggcgga
acctacatatactaccccgactcagtgaagggccgattcaccatctccagagacaacgccaagaactcactgtatctgcaa
atgaacagcctgagagccgaggacacggccgtgtattactgtgcgagacttgggggggataattactacgaatacttcgat
gtctggggcaaagggaccacggtcaccgtctcctccggcggtggcggatccggcggtggcggatccggcggtggcggatcc
gacattgtgctgacccagtctccagcctccttggccgtgtctccaggacagagggccaccatcacctgcagagccagtaag
agtgtcagtaccagcggatactcctacatgcactggtatcagcagaaaccaggacaacctcctaaactcctgatttacctg
gcatccaatctggagagcggggtcccagccaggttcagcggcagtgggtctgggaccgatttcaccctcacaattaatcct
gtggaagctaatgatactgcaaattattactgtcagcacagtagggagctgcctttcacattcggcggagggaccaaggtg
gagatcaaacgaactgagcccaaatcttgtgacaaaactcacacatgcccaccgtgcccagcacctgaactcctgggggga
ccgtcagtcttcctcttccccccaaaacccaaggacaccctcatgatctcccggacccctgaggtcacatgcgtggtggtg
gacgtgagccacgaagaccctgaggtcaagttcaactggtacgtggacggcgtggaggtgcataatgccaagacaaagccg
cgggaggagcagtacaacagcacgtaccgtgtggtcagcgtcctcaccgtcctgcaccaggactggctgaatggcaaggag
tacaagtgcaaggtctccaacaaagccctcccagcccccatcgagaaaaccatctccaaagccaaagggcagccccgagaa
ccacaggtgtacaccctgcccccatcccgggaggagatgaccaagaaccaggtcagcctgacctgcctggtcaaaggcttc
tatcccagcgacatcgccgtggagtgggagagcaatgggcagccggagaacaactacaagaccacgcctcccgtgctggac
tccgacggctccttcttcctctacagcaagctcaccgtggacaagagcaggtggcagcaggggaacgtcttctcatgctcc
gtgatgcatgaggctctgcacaaccactacacgcagaagagcctctccctgtctccgggtaaatgataa
(amino acids)
(SEQ ID NO: 261)
METDTLLLWVLLLWVPGSTGDAAQPAEVQLVESGGGLVKPGGSLRLSCAASGFTFSGYAMSWVRQAPGKGLEWVSTISSG
GTYIYYPDSVKGRFTISRDNAKNSLYLQMNSLRAEDTAVYYCARLGGDNYYEYFDVWGKGTTVTVSSGGGGSGGGGSGGG
GSDIVLTQSPASLAVSPGQRATITCRASKSVSTSGYSYMHWYQQKPGQPPKLLIYLASNLESGVPARFSGSGSGTDFTLT
INPVEANDTANYYCQHSRELPFTFGGGTKVEIKRTEPKSCDKTHTCPPCPAPELLGGPSVFLFPPKPKDTLMISRTPEVT
CVVVDVSHEDPEVKFNWYVDGVEVHNAKTKPREEQYNSTYRVVSVLTVLHQDWLNGKEYKCKVSNKALPAPIEKTISKAK
GQPREPQVYTLPPSREEMTKNQVSLTCLVKGFYPSDIAVEWESNGQPENNYKTTPPVLDSDGSFFLYSKLTVDKSRWQQG
NVFSCSVMHEALHNHYTQKSLSLSPGK**
C2 scFV-FC 1 gBLOCk sequence:
(DNA)
(SEQ ID NO: 262)
tgctctgggttccaggttccactggtgacgcggcccagccggccgaggtgcagctggtggagtctgggggaggcctggtca
agcctggggggtccctgagactctcctgtgcagcctctggattcaccttcagtggctatgccatgagctgggtccgccagg
ctccagggaaggggctggagtgggtctcaaccattagtagtggcggaacctacatatactaccccgactcagtgaagggcc
gattcaccatctccagagacaacgccaagaactcactgtatctgcaaatgaacagcctgagagccgaggacacggccgtgt
attactgtgcgagacttgggggggataattactacgaatacttcgatgtctggggcaaagggaccacggtcaccgtctcct
ccggcggtggcggatccggcggtggcggatccggcggtggcggatccgacattgtgctgacccagtctccagcctccttgg
c
C2 scFV-FC 2 gBLOCk sequence:
(DNA)
(SEQ ID NO: 263)
cattgtgctgacccagtctccagcctccttggccgtgtctccaggacagagggccaccatcacctgcagagccagtaagag
tgtcagtaccagcggatactcctacatgcactggtatcagcagaaaccaggacaacctcctaaactcctgatttacctggc
atccaatctggagagcggggtcccagccaggttcagcggcagtgggtctgggaccgatttcaccctcacaattaatcctgt
ggaagctaatgatactgcaaattattactgtcagcacagtagggagctgcctttcacattcggcggagggaccaaggtgga
gatcaaacgaactgagcccaaatcttgtgacaaaactcacacatgcccaccgtgcccagcacctgaactcctggggggacc
gtcagtcttcctcttccccccaaaacccaaggacaccctcatgatctcccggacccctgaggtcacatgcgtggtggtgga
cgtgagccacgaagaccctgaggtcaagttcaactggtacgtggacggcgtggaggtgcataatgccaagacaaagccgcg
ggaggagcagtacaacagcacgtaccgtgtggtcagc
pSECTag2 C3 scFV-FC
(DNA)
(SEQ ID NO: 264)
atggagacagacacactcctgctatgggtactgctgctctgggttccaggttccactggtgacgcggcccagccggcccag
gttcagctggtgcagtctggagctgaggtgaagaagcctggggcctcagtgaaggtctcctgcaaggcttctggttacacc
tttaccgactacgccatgaactgggtgcgacaggcccctggacaagggcttgagtggatgggagtgatcagcaccttcagc
ggtaacacaaacttcaaccagaagttcaagggcagagtcaccatgaccacagacacatccacgagcacagcctacatggag
ctgaggagcctgagatctgacgacacggccgtgtattactgtgcgagaagcgactactacggcccatacttcgactactgg
ggccagggcaccaccctgaccgtgtccagcggcggtggcggatccggcggtggcggatccggcggtggcggatccgatatt
gtgatgacccagactccactctctctgtccgtcacccctggacagccggcctccatctcctgcaggtctagtcagaccatt
gtccatagtaatggaaacacctatttggagtggtacctgcagaagccaggccagtctccacagctcctgatctataaggtt
tccaaccggttctctggagtgccagataggttcagtggcagcgggtcagggacagatttcacactgaaaatcagccgggtg
gaggctgaggatgttggggtttattactgcttccaaggtagccacgtgcctttcaccttcggcggagggaccaaggtggag
atcaaacgaactgagcccaaatcttgtgacaaaactcacacatgcccaccgtgcccagcacctgaactcctggggggaccg
tcagtcttcctcttccccccaaaacccaaggacaccctcatgatctcccggacccctgaggtcacatgcgtggtggtggac
gtgagccacgaagaccctgaggtcaagttcaactggtacgtggacggcgtggaggtgcataatgccaagacaaagccgcgg
gaggagcagtacaacagcacgtaccgtgtggtcagcgtcctcaccgtcctgcaccaggactggctgaatggcaaggagtac
aagtgcaaggtctccaacaaagccctcccagcccccatcgagaaaaccatctccaaagccaaagggcagccccgagaacca
caggtgtacaccctgcccccatcccgggaggagatgaccaagaaccaggtcagcctgacctgcctggtcaaaggcttctat
cccagcgacatcgccgtggagtgggagagcaatgggcagccggagaacaactacaagaccacgcctcccgtgctggactcc
gacggctccttcttcctctacagcaagctcaccgtggacaagagcaggtggcagcaggggaacgtcttctcatgctccgtg
atgcatgaggctctgcacaaccactacacgcagaagagcctctccctgtctccgggtaaatgataa
(amino acids)
(SEQ ID NO: 265)
METDTLLLWVLLLWVPGSTGDAAQPAQVQLVQSGAEVKKPGASVKVSCKASGYTFTDYAMNWVRQAPGQGLEWMGVISTF
SGNTNFNQKFKGRVTMTTDTSTSTAYMELRSLRSDDTAVYYCARSDYYGPYFDYWGQGTTLTVSSGGGGSGGGGSGGGGS
DIVMTQTPLSLSVTPGQPASISCRSSQTIVHSNGNTYLEWYLQKPGQSPQLLIYKVSNRFSGVPDRFSGSGSGTDFTLKI
SRVEAEDVGVYYCFQGSHVPFTFGGGTKVEIKRTEPKSCDKTHTCPPCPAPELLGGPSVFLFPPKPKDTLMISRTPEVTC
VVVDVSHEDPEVKFNWYVDGVEVHNAKTKPREEQYNSTYRVVSVLTVLHQDWLNGKEYKCKVSNKALPAPIEKTISKAKG
QPREPQVYTLPPSREEMTKNQVSLTCLVKGFYPSDIAVEWESNGQPENNYKTTPPVLDSDGSFFLYSKLTVDKSRWQQGN
VFSCSVMHEALHNHYTQKSLSLSPGK**
C3 GS scFV FC 1 gBLOCk sequence:
(DNA)
(SEQ ID NO: 266)
tgctctgggttccaggttccactggtgacgcggcccagccggcccaggttcagctggtgcagtctggagctgaggtgaaga
agcctggggcctcagtgaaggtctcctgcaaggcttctggttacacctttaccgactacgccatgaactgggtgcgacagg
cccctggacaagggcttgagtggatgggagtgatcagcaccttcagcggtaacacaaacttcaaccagaagttcaagggca
gagtcaccatgaccacagacacatccacgagcacagcctacatggagctgaggagcctgagatctgacgacacggccgtgt
attactgtgcgagaagcgactactacggcccatacttcgactactggggccagggcaccaccctgaccgtgtccagcggcg
gtggcggatccggcggtggcggatccggcggtggcggatccgatattgtgatgacccagactccactctctctgt
C3 scFV FC2 gBLOCk sequence:
(DNA)
(SEQ ID NO: 267)
tattgtgatgacccagactccactctctctgtccgtcacccctggacagccggcctccatctcctgcaggtctagtcagac
cattgtccatagtaatggaaacacctatttggagtggtacctgcagaagccaggccagtctccacagctcctgatctataa
ggtttccaaccggttctctggagtgccagataggttcagtggcagcgggtcagggacagatttcacactgaaaatcagccg
ggtggaggctgaggatgttggggtttattactgcttccaaggtagccacgtgcctttcaccttcggcggagggaccaaggt
ggagatcaaacgaactgagcccaaatcttgtgacaaaactcacacatgcccaccgtgcccagcacctgaactcctgggggg
accgtcagtcttcctcttccccccaaaacccaaggacaccctcatgatctcccggacccctgaggtcacatgcgtggtggt
ggacgtgagccacgaagaccctgaggtcaagttcaactggtacgtggacggcgtggaggtgcataatgccaagacaaagcc
gcgggaggagcagtacaacagcacgtaccgtgtggtcagc
pSECTag2 C8 scFV-FC
(DNA)
(SEQ ID NO: 268)
atggagacagacacactcctgctatgggtactgctgctctgggttccaggttccactggtgacgcggcccagccggccgag
gtgcagctggtggagtctgggggaggcctggtcaagcctggggggtccctgagactctcctgtgcagcctctggattcacc
ttcagtggctatgccatgagctgggtccgccaggctccagggaaggggctggagtgggtctcaaccattagtagtggcgga
acctacatatactaccctgactcagtgaagggccgattcaccatctccagagacaacgccaagaactcactgtatctgcaa
atgaacagcctgagagccgaggacacggccgtgtattactgtgcgagactgggcggcgataactattatgaatattggggc
aaagggaccacggtcaccgtctcctccggcggtggcggatccggcggtggcggatccggcggtggcggatccgacatcgtg
atgacccagtctccagactccctggctgtgtctctgggcgagagggccaccatcaactgcagggccagcaagagtgttagc
accagcggctacagctacatgcactggtaccagcagaaaccaggacagcctcctaagctgctcatttacctggtgtctaac
ctggaatccggggtccctgaccgattcagtggcagcgggtctgggacagatttcactctcaccatcagcagcctgcaggct
gaagatgtggcagtttattactgtcaacacattcgggaactgaccaggagtgaattcggcggagggaccaaggtggagatc
aaacgaactgagcccaaatcttgtgacaaaactcacacatgcccaccgtgcccagcacctgaactcctggggggaccgtca
gtcttcctcttccccccaaaacccaaggacaccctcatgatctcccggacccctgaggtcacatgcgtggtggtggacgtg
agccacgaagaccctgaggtcaagttcaactggtacgtggacggcgtggaggtgcataatgccaagacaaagccgcgggag
gagcagtacaacagcacgtaccgtgtggtcagcgtcctcaccgtcctgcaccaggactggctgaatggcaaggagtacaag
tgcaaggtctccaacaaagccctcccagcccccatcgagaaaaccatctccaaagccaaagggcagccccgagaaccacag
gtgtacaccctgcccccatcccgggaggagatgaccaagaaccaggtcagcctgacctgcctggtcaaaggcttctatccc
agcgacatcgccgtggagtgggagagcaatgggcagccggagaacaactacaagaccacgcctcccgtgctggactccgac
ggctccttcttcctctacagcaagctcaccgtggacaagagcaggtggcagcaggggaacgtcttctcatgctccgtgatg
catgaggctctgcacaaccactacacgcagaagagcctctccctgtctccgggtaaatgataa
(amino acids)
(SEQ ID NO: 269)
METDTLLLWVLLLWVPGSTGDAAQPAEVQLVESGGGLVKPGGSLRLSCAASGFTFSGYAMSWVRQAPGKGLEWVSTISSG
GTYIYYPDSVKGRFTISRDNAKNSLYLQMNSLRAEDTAVYYCARLGGDNYYEYWGKGTTVTVSSGGGGSGGGGSGGGGSD
IVMTQSPDSLAVSLGERATINCRASKSVSTSGYSYMHWYQQKPGQPPKLLIYLVSNLESGVPDRFSGSGSGTDFTLTISS
LQAEDVAVYYCQHIRELTRSEFGGGTKVEIKRTEPKSCDKTHTCPPCPAPELLGGPSVFLFPPKPKDTLMISRTPEVTCV
VVDVSHEDPEVKFNWYVDGVEVHNAKTKPREEQYNSTYRVVSVLTVLHQDWLNGKEYKCKVSNKALPAPIEKTISKAKGQ
PREPQVYTLPPSREEMTKNQVSLTCLVKGFYPSDIAVEWESNGQPENNYKTTPPVLDSDGSFFLYSKLTVDKSRWQQGNV
FSCSVMHEALHNHYTQKSLSLSPGK**
C8 scFV FC 1 gBLOCk sequence:
(DNA)
(SEQ ID NO: 270)
tgctctgggttccaggttccactggtgacgcggcccagccggccgaggtgcagctggtggagtctgggggaggcctggtca
agcctggggggtccctgagactctcctgtgcagcctctggattcaccttcagtggctatgccatgagctgggtccgccagg
ctccagggaaggggctggagtgggtctcaaccattagtagtggcggaacctacatatactaccctgactcagtgaagggcc
gattcaccatctccagagacaacgccaagaactcactgtatctgcaaatgaacagcctgagagccgaggacacggccgtgt
attactgtgcgagactgggcggcgataactattatgaatattggggcaaagggaccacggtcaccgtctcctccggcggtg
gcggatccggcggtggcggatccggcggtggcggatccgacatcgtgatgacccagtctccagactccctgg
C8 scFV FC2 gBLOCk sequence:
(DNA)
(SEQ ID NO: 271)
catcgtgatgacccagtctccagactccctggctgtgtctctgggcgagagggccaccatcaactgcagggccagcaagag
tgttagcaccagcggctacagctacatgcactggtaccagcagaaaccaggacagcctcctaagctgctcatttacctggt
gtctaacctggaatccggggtccctgaccgattcagtggcagcgggtctgggacagatttcactctcaccatcagcagcct
gcaggctgaagatgtggcagtttattactgtcaacacattcgggaactgaccaggagtgaattcggcggagggaccaaggt
ggagatcaaacgaactgagcccaaatcttgtgacaaaactcacacatgcccaccgtgcccagcacctgaactcctgggggg
accgtcagtcttcctcttccccccaaaacccaaggacaccctcatgatctcccggacccctgaggtcacatgcgtggtggt
ggacgtgagccacgaagaccctgaggtcaagttcaactggtacgtggacggcgtggaggtgcataatgccaagacaaagcc
gcgggaggagcagtacaacagcacgtaccgtgtggtcagc
Human IgG1 Fc sequence:
(DNA)
(SEQ ID NO: 272)
gagcccaaatcttgtgacaaaactcacacatgcccaccgtgcccagcacctgaactcctggggggaccgtcagtcttcctc
ttccccccaaaacccaaggacaccctcatgatctcccggacccctgaggtcacatgcgtggtggtggacgtgagccacgaa
gaccctgaggtcaagttcaactggtacgtggacggcgtggaggtgcataatgccaagacaaagccgcgggaggagcagtac
aacagcacgtaccgtgtggtcagcgtcctcaccgtcctgcaccaggactggctgaatggcaaggagtacaagtgcaaggtc
tccaacaaagccctcccagcccccatcgagaaaaccatctccaaagccaaagggcagccccgagaaccacaggtgtacacc
ctgcccccatcccgggaggagatgaccaagaaccaggtcagcctgacctgcctggtcaaaggcttctatcccagcgacatc
gccgtggagtgggagagcaatgggcagccggagaacaactacaagaccacgcctcccgtgctggactccgacggctccttc
ttcctctacagcaagctcaccgtggacaagagcaggtggcagcaggggaacgtcttctcatgctccgtgatgcatgaggct
ctgcacaaccactacacgcagaagagcctctccctgtctccgggtaaatgataa
(amino acids)
(SEQ ID NO: 273)
EPKSCDKTHTCPPCPAPELLGGPSVFLFPPKPKDTLMISRTPEVTCVVVDVSHEDPEVKFNWYVDGVEVHNAKTKPREEQ
YNSTYRVVSVLTVLHQDWLNGKEYKCKVSNKALPAPIEKTISKAKGQPREPQVYTLPPSREEMTKNQVSLTCLVKGFYPS
DIAVEWESNGQPENNYKTTPPVLDSDGSFFLYSKLTVDKSRWQQGNVFSCSVMHEALHNHYTQKSLSLSPGK**
Human IgG1 CH2-CH3 domain sequence:
(DNA)
(SEQ ID NO: 274)
ccgtgcccagcacctgaactcctggggggaccgtcagtcttcctcttccccccaaaacccaaggacaccctcatgatctcc
cggacccctgaggtcacatgcgtggtggtggacgtgagccacgaagaccctgaggtcaagttcaactggtacgtggacggc
gtggaggtgcataatgccaagacaaagccgcgggaggagcagtacaacagcacgtaccgtgtggtcagcgtcctcaccgtc
ctgcaccaggactggctgaatggcaaggagtacaagtgcaaggtctccaacaaagccctcccagcccccatcgagaaaacc
atctccaaagccaaagggcagccccgagaaccacaggtgtacaccctgcccccatcccgggaggagatgaccaagaaccag
gtcagcctgacctgcctggtcaaaggcttctatcccagcgacatcgccgtggagtgggagagcaatgggcagccggagaac
aactacaagaccacgcctcccgtgctggactccgacggctccttcttcctctacagcaagctcaccgtggacaagagcagg
tggcagcaggggaacgtcttctcatgctccgtgatgcatgaggctctgcacaaccactacacgcagaagagcctctccctg
tctccgggtaaatgataa
(amino acids)
(SEQ ID NO: 275)
PCPAPELLGGPSVFLFPPKPKDTLMISRTPEVTCVVVDVSHEDPEVKFNWYVDGVEVHNAKTKPREEQYNSTYRVVSVLT
VLHQDWLNGKEYKCKVSNKALPAPIEKTISKAKGQPREPQVYTLPPSREEMTKNQVSLTCLVKGFYPSDIAVEWESNGQP
ENNYKTTPPVLDSDGSFFLYSKLTVDKSRWQQGNVFSCSVMHEALHNHYTQKSLSLSPGK**
Human IgG1 CH3 domain sequence:
(DNA)
(SEQ ID NO: 276)
gggcagccccgagaaccacaggtgtacaccctgcccccatcccgggaggagatgaccaagaaccaggtcagcctgacctgc
ctggtcaaaggcttctatcccagcgacatcgccgtggagtgggagagcaatgggcagccggagaacaactacaagaccacg
cctcccgtgctggactccgacggctccttcttcctctacagcaagctcaccgtggacaagagcaggtggcagcaggggaac
gtcttctcatgctccgtgatgcatgaggctctgcacaaccactacacgcagaagagcctctccctgtctccgggtaaatga
taa
(amino acids)
(SEQ ID NO: 277)
GQPREPQVYTLPPSREEMTKNQVSLTCLVKGFYPSDIAVEWESNGQPENNYKTTPPVLDSDGSFFLYSKLTVDKSRWQQG
NVFSCSVMHEALHNHYTQKSLSLSPGK**
Human IgG1 Fc Y407R sequence:
(DNA)
(SEQ ID NO: 278)
gagcccaaatcttgtgacaaaactcacacatgcccaccgtgcccagcacctgaactcctggggggaccgtcagtcttcctc
ttccccccaaaacccaaggacaccctcatgatctcccggacccctgaggtcacatgcgtggtggtggacgtgagccacgaa
gaccctgaggtcaagttcaactggtacgtggacggcgtggaggtgcataatgccaagacaaagccgcgggaggagcagtac
aacagcacgtaccgtgtggtcagcgtcctcaccgtcctgcaccaggactggctgaatggcaaggagtacaagtgcaaggtc
tccaacaaagccctcccagcccccatcgagaaaaccatctccaaagccaaagggcagccccgagaaccacaggtgtacacc
ctgcccccatcccgggaggagatgaccaagaaccaggtcagcctgacctgcctggtcaaaggcttctatcccagcgacatc
gccgtggagtgggagagcaatgggcagccggagaacaactacaagaccacgcctcccgtgctggactccgacggctccttc
ttcctcaggagcaagctcaccgtggacaagagcaggtggcagcaggggaacgtcttctcatgctccgtgatgcatgaggct
ctgcacaaccactacacgcagaagagcctctccctgtctccgggtaaatgataa
(amino acids)
(SEQ ID NO: 279)
EPKSCDKTHTCPPCPAPELLGGPSVFLFPPKPKDTLMISRTPEVTCVVVDVSHEDPEVKFNWYVDGVEVHNAKTKPREEQ
YNSTYRVVSVLTVLHQDWLNGKEYKCKVSNKALPAPIEKTISKAKGQPREPQVYTLPPSREEMTKNQVSLTCLVKGFYPS
DIAVEWESNGQPENNYKTTPPVLDSDGSFFLRSKLTVDKSRWQQGNVFSCSVMHEALHNHYTQKSLSLSPGK**
Human IgG1 Fc F405Q sequence:
(DNA)
(SEQ ID NO: 280)
gagcccaaatcttgtgacaaaactcacacatgcccaccgtgcccagcacctgaactcctggggggaccgtcagtcttcctc
ttccccccaaaacccaaggacaccctcatgatctcccggacccctgaggtcacatgcgtggtggtggacgtgagccacgaa
gaccctgaggtcaagttcaactggtacgtggacggcgtggaggtgcataatgccaagacaaagccgcgggaggagcagtac
aacagcacgtaccgtgtggtcagcgtcctcaccgtcctgcaccaggactggctgaatggcaaggagtacaagtgcaaggtc
tccaacaaagccctcccagcccccatcgagaaaaccatctccaaagccaaagggcagccccgagaaccacaggtgtacacc
ctgcccccatcccgggaggagatgaccaagaaccaggtcagcctgacctgcctggtcaaaggcttctatcccagcgacatc
gccgtggagtgggagagcaatgggcagccggagaacaactacaagaccacgcctcccgtgctggactccgacggctccttc
cagctctacagcaagctcaccgtggacaagagcaggtggcagcaggggaacgtcttctcatgctccgtgatgcatgaggct
ctgcacaaccactacacgcagaagagcctctccctgtctccgggtaaatgataa
(amino acids)
(SEQ ID NO: 281)
EPKSCDKTHTCPPCPAPELLGGPSVFLFPPKPKDTLMISRTPEVTCVVVDVSHEDPEVKFNWYVDGVEVHNAKTKPREEQ
YNSTYRVVSVLTVLHQDWLNGKEYKCKVSNKALPAPIEKTISKAKGQPREPQVYTLPPSREEMTKNQVSLTCLVKGFYPS
DIAVEWESNGQPENNYKTTPPVLDSDGSFQLYSKLTVDKSRWQQGNVFSCSVMHEALHNHYTQKSLSLSPGK**
Human IgG1 Fc T394D sequence:
(DNA)
(SEQ ID NO: 282)
gagcccaaatcttgtgacaaaactcacacatgcccaccgtgcccagcacctgaactcctggggggaccgtcagtcttcctc
ttccccccaaaacccaaggacaccctcatgatctcccggacccctgaggtcacatgcgtggtggtggacgtgagccacgaa
gaccctgaggtcaagttcaactggtacgtggacggcgtggaggtgcataatgccaagacaaagccgcgggaggagcagtac
aacagcacgtaccgtgtggtcagcgtcctcaccgtcctgcaccaggactggctgaatggcaaggagtacaagtgcaaggtc
tccaacaaagccctcccagcccccatcgagaaaaccatctccaaagccaaagggcagccccgagaaccacaggtgtacacc
ctgcccccatcccgggaggagatgaccaagaaccaggtcagcctgacctgcctggtcaaaggcttctatcccagcgacatc
gccgtggagtgggagagcaatgggcagccggagaacaactacaagaccgaccctcccgtgctggactccgacggctccttc
ttcctctacagcaagctcaccgtggacaagagcaggtggcagcaggggaacgtcttctcatgctccgtgatgcatgaggct
ctgcacaaccactacacgcagaagagcctctccctgtctccgggtaaatgataa
(amino acids)
(SEQ ID NO: 283)
EPKSCDKTHTCPPCPAPELLGGPSVFLFPPKPKDTLMISRTPEVTCVVVDVSHEDPEVKFNWYVDGVEVHNAKTKPREEQ
YNSTYRVVSVLTVLHQDWLNGKEYKCKVSNKALPAPIEKTISKAKGQPREPQVYTLPPSREEMTKNQVSLTCLVKGFYPS
DIAVEWESNGQPENNYKTDPPVLDSDGSFFLYSKLTVDKSRWQQGNVFSCSVMHEALHNHYTQKSLSLSPGK**
Human IgG1 Fc T366W/L368W sequence:
(DNA)
(SEQ ID NO: 284)
gagcccaaatcttgtgacaaaactcacacatgcccaccgtgcccagcacctgaactcctggggggaccgtcagtcttcctc
ttccccccaaaacccaaggacaccctcatgatctcccggacccctgaggtcacatgcgtggtggtggacgtgagccacgaa
gaccctgaggtcaagttcaactggtacgtggacggcgtggaggtgcataatgccaagacaaagccgcgggaggagcagtac
aacagcacgtaccgtgtggtcagcgtcctcaccgtcctgcaccaggactggctgaatggcaaggagtacaagtgcaaggtc
tccaacaaagccctcccagcccccatcgagaaaaccatctccaaagccaaagggcagccccgagaaccacaggtgtacacc
ctgcccccatcccgggaggagatgaccaagaaccaggtcagcctgtggtgctgggtcaaaggcttctatcccagcgacatc
gccgtggagtgggagagcaatgggcagccggagaacaactacaagaccacgcctcccgtgctggactccgacggctccttc
ttcctctacagcaagctcaccgtggacaagagcaggtggcagcaggggaacgtcttctcatgctccgtgatgcatgaggct
ctgcacaaccactacacgcagaagagcctctccctgtctccgggtaaatgataa
(amino acids)
(SEQ ID NO: 285)
EPKSCDKTHTCPPCPAPELLGGPSVFLFPPKPKDTLMISRTPEVTCVVVDVSHEDPEVKFNWYVDGVEVHNAKTKPREEQ
YNSTYRVVSVLTVLHQDWLNGKEYKCKVSNKALPAPIEKTISKAKGQPREPQVYTLPPSREEMTKNQVSLWCWVKGFYPS
DIAVEWESNGQPENNYKTTPPVLDSDGSFFLYSKLTVDKSRWQQGNVFSCSVMHEALHNHYTQKSLSLSPGK**
Human IgG1 Fc T364R/L368R sequence:
(DNA)
(SEQ ID NO: 286)
gagcccaaatcttgtgacaaaactcacacatgcccaccgtgcccagcacctgaactcctggggggaccgtcagtcttcctc
ttccccccaaaacccaaggacaccctcatgatctcccggacccctgaggtcacatgcgtggtggtggacgtgagccacgaa
gaccctgaggtcaagttcaactggtacgtggacggcgtggaggtgcataatgccaagacaaagccgcgggaggagcagtac
aacagcacgtaccgtgtggtcagcgtcctcaccgtcctgcaccaggactggctgaatggcaaggagtacaagtgcaaggtc
tccaacaaagccctcccagcccccatcgagaaaaccatctccaaagccaaagggcagccccgagaaccacaggtgtacacc
ctgcccccatcccgggaggagatgaccaagaaccaggtcaggctgacctgcagggtcaaaggcttctatcccagcgacatc
gccgtggagtgggagagcaatgggcagccggagaacaactacaagaccacgcctcccgtgctggactccgacggctccttc
ttcctctacagcaagctcaccgtggacaagagcaggtggcagcaggggaacgtcttctcatgctccgtgatgcatgaggct
ctgcacaaccactacacgcagaagagcctctccctgtctccgggtaaatgataa
(amino acids)
(SEQ ID NO: 287)
EPKSCDKTHTCPPCPAPELLGGPSVFLFPPKPKDTLMISRTPEVTCVVVDVSHEDPEVKFNWYVDGVEVHNAKTKPREEQ
YNSTYRVVSVLTVLHQDWLNGKEYKCKVSNKALPAPIEKTISKAKGQPREPQVYTLPPSREEMTKNQVRLTCRVKGFYPS
DIAVEWESNGQPENNYKTTPPVLDSDGSFFLYSKLTVDKSRWQQGNVFSCSVMHEALHNHYTQKSLSLSPGK**
Human IgG1 Fc hingeless sequence:
(DNA)
(SEQ ID NO: 288)
gcacctgaactcctggggggaccgtcagtcttcctcttccccccaaaacccaaggacaccctcatgatctcccggacccct
gaggtcacatgcgtggtggtggacgtgagccacgaagaccctgaggtcaagttcaactggtacgtggacggcgtggaggtg
cataatgccaagacaaagccgcgggaggagcagtacaacagcacgtaccgtgtggtcagcgtcctcaccgtcctgcaccag
gactggctgaatggcaaggagtacaagtgcaaggtctccaacaaagccctcccagcccccatcgagaaaaccatctccaaa
gccaaagggcagccccgagaaccacaggtgtacaccctgcccccatcccgggaggagatgaccaagaaccaggtcagcctg
acctgcctggtcaaaggcttctatcccagcgacatcgccgtggagtgggagagcaatgggcagccggagaacaactacaag
accacgcctcccgtgctggactccgacggctccttcttcctctacagcaagctcaccgtggacaagagcaggtggcagcag
gggaacgtcttctcatgctccgtgatgcatgaggctctgcacaaccactacacgcagaagagcctctccctgtctccgggt
aaatgataa
(amino acids)
(SEQ ID NO: 289)
APELLGGPSVFLFPPKPKDTLMISRTPEVTCVVVDVSHEDPEVKFNWYVDGVEVHNAKTKPREEQYNSTYRVVSVLTVLH
QDWLNGKEYKCKVSNKALPAPIEKTISKAKGQPREPQVYTLPPSREEMTKNQVSLTCLVKGFYPSDIAVEWESNGQPENN
YKTTPPVLDSDGSFFLYSKLTVDKSRWQQGNVFSCSVMHEALHNHYTQKSLSLSPGK**
Human IgG1 G237A FC sequence:
(DNA)
(SEQ ID NO: 290)
gagcccaaatcttgtgacaaaactcacacatgcccaccgtgcccagcacctgaactcctgggggccccgtcagtcttcctc
ttccccccaaaacccaaggacaccctcatgatctcccggacccctgaggtcacatgcgtggtggtggacgtgagccacgaa
gaccctgaggtcaagttcaactggtacgtggacggcgtggaggtgcataatgccaagacaaagccgcgggaggagcagtac
aacagcacgtaccgtgtggtcagcgtcctcaccgtcctgcaccaggactggctgaatggcaaggagtacaagtgcaaggtc
tccaacaaagccctcccagcccccatcgagaaaaccatctccaaagccaaagggcagccccgagaaccacaggtgtacacc
ctgcccccatcccgggaggagatgaccaagaaccaggtcagcctgacctgcctggtcaaaggcttctatcccagcgacatc
gccgtggagtgggagagcaatgggcagccggagaacaactacaagaccacgcctcccgtgctggactccgacggctccttc
ttcctctacagcaagctcaccgtggacaagagcaggtggcagcaggggaacgtcttctcatgctccgtgatgcatgaggct
ctgcacaaccactacacgcagaagagcctctccctgtctccgggtaaa
(amino acids)
(SEQ ID NO: 291)
EPKSCDKTHTCPPCPAPELLGAPSVFLFPPKPKDTLMISRTPEVTCVVVDVSHEDPEVKFNWYVDGVEVHNAKTKPREEQY
NSTYRVVSVLTVLHQDWLNGKEYKCKVSNKALPAPIEKTISKAKGQPREPQVYTLPPSREEMTKNQVSLTCLVKGFYPSDI
AVEWESNGQPENNYKTTPPVLDSDGSFFLYSKLTVDKSRWQQGNVFSCSVMHEALHNHYTQKSLSLSPGK
Human IgG1 L234A/L235A FC sequence:
(DNA)
(SEQ ID NO: 292)
gagcccaaatcttgtgacaaaactcacacatgcccaccgtgcccagcacctgaagccgccgggggaccgtcagtcttcctc
ttccccccaaaacccaaggacaccctcatgatctcccggacccctgaggtcacatgcgtggtggtggacgtgagccacgaa
gaccctgaggtcaagttcaactggtacgtggacggcgtggaggtgcataatgccaagacaaagccgcgggaggagcagtac
aacagcacgtaccgtgtggtcagcgtcctcaccgtcctgcaccaggactggctgaatggcaaggagtacaagtgcaaggtc
tccaacaaagccctcccagcccccatcgagaaaaccatctccaaagccaaagggcagccccgagaaccacaggtgtacacc
ctgcccccatcccgggaggagatgaccaagaaccaggtcagcctgacctgcctggtcaaaggcttctatcccagcgacatc
gccgtggagtgggagagcaatgggcagccggagaacaactacaagaccacgcctcccgtgctggactccgacggctccttc
ttcctctacagcaagctcaccgtggacaagagcaggtggcagcaggggaacgtcttctcatgctccgtgatgcatgaggct
ctgcacaaccactacacgcagaagagcctctccctgtctccgggtaaa
(amino acids)
(SEQ ID NO: 293)
EPKSCDKTHTCPPCPAPEAAGGPSVFLFPPKPKDTLMISRTPEVTCVVVDVSHEDPEVKFNWYVDGVEVHNAKTKPREEQY
NSTYRVVSVLTVLHQDWLNGKEYKCKVSNKALPAPIEKTISKAKGQPREPQVYTLPPSREEMTKNQVSLTCLVKGFYPSDI
AVEWESNGQPENNYKTTPPVLDSDGSFFLYSKLTVDKSRWQQGNVFSCSVMHEALHNHYTQKSLSLSPGK
CAR-T E6 CD8/CD8/CD3z sequence:
N-CD8ls-huMNE6scFv-CD8ecd fragment- CD8 transmembrane- CD3zeta-C
(DNA)
(SEQ ID NO: 294)
atggccctgcccgtgaccgctttgctgctccccctggcgctgctgctgcacgccgccaggccagaggtccagctggttgag
agtggcggtgggctggttaagcctggcggctccctgcggctgagctgcgccgcgagtggatttactttcagccgatatggg
atgagttgggtgcggcaagctcccgggaagaggctggaatgggtctcaacaatctccggggggggcacttacatctattac
cccgactcagtcaaggggagatttaccatttcacgagacaacgctaagaataccctgtatttgcagatgaattctctgaga
gcagaggacacagctgtttactattgtacccgcgacaactatggcaggaactacgactacggtatggactattggggacaa
gggacattggttacagtgagcagtggcggcgggggcagcggaggaggaggcagcggtggggggggcagcgagatagtgctc
acgcagtcacccgcgactctcagtctctcacctggggaacgagctaccctgacgtgctctgctacctcctcagtgtcatat
attcactggtatcagcaacggcccgggcagtcccctagattgctcatttatagtacctctaatctggcctcaggtatccct
gcacgattttctggatctggttcaggttctgattacaccctcactatctctagcctggagcctgaagactttgccgtttat
tactgccagcagaggtctagctccccattcacctttgggagtgggaccaaggttgaaattaaaacgacaaccccggccccc
agaccaccaacgccagcccccaccatcgccagccaacccctgtctctgagaccagaagcctgtaggcctgccgccggtgga
gctgtgcacacaagaggactggatttcgcctgtgatatctacatttgggccccgctcgcaggcacatgtggagtgctcctc
ctctccctggtgattaccctgtactgccgcgttaagttctcccgatcagccgacgcgcctgcttacaagcagggccagaac
caactgtacaacgagctgaatctcggtagacgggaagagtacgacgtgttggacaaacggagaggccgcgacccagaaatg
ggcggcaagcctcgcaggaaaaacccccaggagggactgtacaatgagttgcagaaagataagatggcagaagcttatagc
gagatcggaatgaagggggaaaggagacgagggaaaggacacgacggcctttatcagggcctgtccacagcaacaaaagat
acgtatgacgccctccatatgcaggcacttccaccacggtgataa
(amino acids)
(SEQ ID NO: 295)
MALPVTALLLPLALLLHAARPEVQLVESGGGLVKPGGSLRLSCAASGFTFSRYGMSWVRQAPGKRLEWVSTISGGGTYIY
YPDSVKGRFTISRDNAKNTLYLQMNSLRAEDTAVYYCTRDNYGRNYDYGMDYWGQGTLVTVSSGGGGSGGGGSGGGGSEI
VLTQSPATLSLSPGERATLTCSATSSVSYIHWYQQRPGQSPRLLIYSTSNLASGIPARFSGSGSGSDYTLTISSLEPEDF
AVYYCQQRSSSPFTFGSGTKVEIKTTTPAPRPPTPAPTIASQPLSLRPEACRPAAGGAVHTRGLDFACDIYIWAPLAGTC
GVLLLSLVITLYCRVKFSRSADAPAYKQGQNQLYNELNLGRREEYDVLDKRRGRDPEMGGKPRRKNPQEGLYNELQKDKM
AEAYSEIGMKGERRRGKGHDGLYQGLSTATKDTYDALHMQALPPR**
**
CAR-T E6 CD3z gBLOCK sequence:
(DNA)
(SEQ ID NO: 296)
tggagctgtgcacacaagaggactggatttcgcctgtgatatctacatttgggccccgctcgcaggcacatgtggagtgct
cctcctctccctggtgattaccctgtactgccgcgttaagttctcccgatcagccgacgcgcctgcttacaagcagggcca
gaaccaactgtacaacgagctgaatctcggtagacgggaagagtacgacgtgttggacaaacggagaggccgcgacccaga
aatgggcggcaagcctcgcaggaaaaacccccaggagggactgtacaatgagttgcagaaagataagatggcagaagctta
tagcgagatcggaatgaagggggaaaggagacgagggaaaggacacgacggcctttatcagggcctgtccacagcaacaaa
agatacgtatgacgccctccatatgcaggcacttccaccacggtgataagtttaaacccgctgatcagcctcgactgtgc
CAR-T E6 CD8/CD8/CD28/CD3z sequence:
N-CD8ls-huMNE6scFv-CD8ecd fragment- CD8 transmembrane- CD28- CD3zeta-C
(DNA)
(SEQ ID NO: 297)
atggccctgcccgtgaccgctttgctgctccccctggcgctgctgctgcacgccgccaggccagaggtccagctggttgag
agtggcggtgggctggttaagcctggcggctccctgcggctgagctgcgccgcgagtggatttactttcagccgatatggg
atgagttgggtgcggcaagctcccgggaagaggctggaatgggtctcaacaatctccggggggggcacttacatctattac
cccgactcagtcaaggggagatttaccatttcacgagacaacgctaagaataccctgtatttgcagatgaattctctgaga
gcagaggacacagctgtttactattgtacccgcgacaactatggcaggaactacgactacggtatggactattggggacaa
gggacattggttacagtgagcagtggcggcgggggcagcggaggaggaggcagcggtggggggggcagcgagatagtgctc
acgcagtcacccgcgactctcagtctctcacctggggaacgagctaccctgacgtgctctgctacctcctcagtgtcatat
attcactggtatcagcaacggcccgggcagtcccctagattgctcatttatagtacctctaatctggcctcaggtatccct
gcacgattttctggatctggttcaggttctgattacaccctcactatctctagcctggagcctgaagactttgccgtttat
tactgccagcagaggtctagctccccattcacctttgggagtgggaccaaggttgaaattaaaacgacaaccccggccccc
agaccaccaacgccagcccccaccatcgccagccaacccctgtctctgagaccagaagcctgtaggcctgccgccggtgga
gctgtgcacacaagaggactggatttcgcctgtgatatctacatttgggccccgctcgcaggcacatgtggagtgctcctc
ctctccctggtgattaccctgtactgcagaagcaagcggtctcggctcctgcattctgattacatgaacatgaccccaaga
agaccaggccccaccaggaaacattaccagccctacgctccgccacgcgacttcgctgcctaccggtcccgcgttaagttc
tcccgatcagccgacgcgcctgcttacaagcagggccagaaccaactgtacaacgagctgaatctcggtagacgggaagag
tacgacgtgttggacaaacggagaggccgcgacccagaaatgggcggcaagcctcgcaggaaaaacccccaggagggactg
tacaatgagttgcagaaagataagatggcagaagcttatagcgagatcggaatgaagggggaaaggagacgagggaaagga
cacgacggcctttatcagggcctgtccacagcaacaaaagatacgtatgacgccctccatatgcaggcacttccaccacgg
tgataa
(amino acids)
(SEQ ID NO: 298)
MALPVTALLLPLALLLHAARPEVQLVESGGGLVKPGGSLRLSCAASGFTFSRYGMSWVRQAPGKRLEWVSTISGGGTYIY
YPDSVKGRFTISRDNAKNTLYLQMNSLRAEDTAVYYCTRDNYGRNYDYGMDYWGQGTLVTVSSGGGGSGGGGSGGGGSEI
VLTQSPATLSLSPGERATLTCSATSSVSYIHWYQQRPGQSPRLLIYSTSNLASGIPARFSGSGSGSDYTLTISSLEPEDF
AVYYCQQRSSSPFTFGSGTKVEIKTTTPAPRPPTPAPTIASQPLSLRPEACRPAAGGAVHTRGLDFACDIYIWAPLAGTC
GVLLLSLVITLYCRSKRSRLLHSDYMNMTPRRPGPTRKHYQPYAPPRDFAAYRSRVKFSRSADAPAYKQGQNQLYNELNL
GRREEYDVLDKRRGRDPEMGGKPRRKNPQEGLYNELQKDKMAEAYSEIGMKGERRRGKGHDGLYQGLSTATKDTYDALHM
QALPPR**
CAR-T E6 CD28/CD3z g BLOCK sequence:
(DNA)
(SEQ ID NO: 299)
tggagctgtgcacacaagaggactggatttcgcctgtgatatctacatttgggccccgctcgcaggcacatgtggagtgct
cctcctctccctggtgattaccctgtactgcagaagcaagcggtctcggctcctgcattctgattacatgaacatgacccc
aagaagaccaggccccaccaggaaacattaccagccctacgctccgccacgcgacttcgctgcctaccggtcccgcgttaa
gttctcccgatcagccgacgcgcctgcttacaagcagggccagaaccaactgtacaacgagctgaatctcggtagacggga
agagtacgacgtgttggacaaacggagaggccgcgacccagaaatgggcggcaagcctcgcaggaaaaacccccaggaggg
actgtacaatgagttgcagaaagataagatggcagaagcttatagcgagatcggaatgaagggggaaaggagacgagggaa
aggacacgacggcctttatcagggcctgtccacagcaacaaaagatacgtatgacgccctccatatgcaggcacttccacc
acggtgataagtttaaacccgctgatcagcctcgactgtgc
CAR-T E6 CD8/CD8/4-1BB/CD3z sequence:
N-CD8ls-huMNE6scFv-CD8ecd fragment- CD8 transmembrane- 4-1BB- CD3zeta-C
(DNA)
(SEQ ID NO: 300)
atggccctgcccgtgaccgctttgctgctccccctggcgctgctgctgcacgccgccaggccagaggtccagctggttgag
agtggcggtgggctggttaagcctggcggctccctgcggctgagctgcgccgcgagtggatttactttcagccgatatggg
atgagttgggtgcggcaagctcccgggaagaggctggaatgggtctcaacaatctccggggggggcacttacatctattac
cccgactcagtcaaggggagatttaccatttcacgagacaacgctaagaataccctgtatttgcagatgaattctctgaga
gcagaggacacagctgtttactattgtacccgcgacaactatggcaggaactacgactacggtatggactattggggacaa
gggacattggttacagtgagcagtggcggcgggggcagcggaggaggaggcagcggtggggggggcagcgagatagtgctc
acgcagtcacccgcgactctcagtctctcacctggggaacgagctaccctgacgtgctctgctacctcctcagtgtcatat
attcactggtatcagcaacggcccgggcagtcccctagattgctcatttatagtacctctaatctggcctcaggtatccct
gcacgattttctggatctggttcaggttctgattacaccctcactatctctagcctggagcctgaagactttgccgtttat
tactgccagcagaggtctagctccccattcacctttgggagtgggaccaaggttgaaattaaaacgacaaccccggccccc
agaccaccaacgccagcccccaccatcgccagccaacccctgtctctgagaccagaagcctgtaggcctgccgccggtgga
gctgtgcacacaagaggactggatttcgcctgtgatatctacatttgggccccgctcgcaggcacatgtggagtgctcctc
ctctccctggtgattaccctgtactgcaaaaggggccgcaaaaaactcctttacatttttaagcagccttttatgaggcca
gtacagacgactcaagaggaagacgggtgctcatgccgctttcctgaggaggaggaaggagggtgcgaactgcgcgttaag
ttctcccgatcagccgacgcgcctgcttacaagcagggccagaaccaactgtacaacgagctgaatctcggtagacgggaa
gagtacgacgtgttggacaaacggagaggccgcgacccagaaatgggcggcaagcctcgcaggaaaaacccccaggaggga
ctgtacaatgagttgcagaaagataagatggcagaagcttatagcgagatcggaatgaagggggaaaggagacgagggaaa
ggacacgacggcctttatcagggcctgtccacagcaacaaaagatacgtatgacgccctccatatgcaggcacttccacca
cggtgataa
(amino acids)
(SEQ ID NO: 301)
MALPVTALLLPLALLLHAARPEVQLVESGGGLVKPGGSLRLSCAASGFTFSRYGMSWVRQAPGKRLEWVSTISGGGTYIY
YPDSVKGRFTISRDNAKNTLYLQMNSLRAEDTAVYYCTRDNYGRNYDYGMDYWGQGTLVTVSSGGGGSGGGGSGGGGSEI
VLTQSPATLSLSPGERATLTCSATSSVSYIHWYQQRPGQSPRLLIYSTSNLASGIPARFSGSGSGSDYTLTISSLEPEDF
AVYYCQQRSSSPFTFGSGTKVEIKTTTPAPRPPTPAPTIASQPLSLRPEACRPAAGGAVHTRGLDFACDIYIWAPLAGTC
GVLLLSLVITLYCKRGRKKLLYIFKQPFMRPVQTTQEEDGCSCRFPEEEEGGCELRVKFSRSADAPAYKQGQNQLYNELN
LGRREEYDVLDKRRGRDPEMGGKPRRKNPQEGLYNELQKDKMAEAYSEIGMKGERRRGKGHDGLYQGLSTATKDTYDALH
MQALPPR**
CAR-T E6 4-1BB/CD3z gBLOCK sequence:
(DNA)
(SEQ ID NO: 302)
tggagctgtgcacacaagaggactggatttcgcctgtgatatctacatttgggccccgctcgcaggcacatgtggagtgct
cctcctctccctggtgattaccctgtactgcaaaaggggccgcaaaaaactcctttacatttttaagcagccttttatgag
gccagtacagacgactcaagaggaagacgggtgctcatgccgctttcctgaggaggaggaaggagggtgcgaactgcgcgt
taagttctcccgatcagccgacgcgcctgcttacaagcagggccagaaccaactgtacaacgagctgaatctcggtagacg
ggaagagtacgacgtgttggacaaacggagaggccgcgacccagaaatgggcggcaagcctcgcaggaaaaacccccagga
gggactgtacaatgagttgcagaaagataagatggcagaagcttatagcgagatcggaatgaagggggaaaggagacgagg
gaaaggacacgacggcctttatcagggcctgtccacagcaacaaaagatacgtatgacgccctccatatgcaggcacttcc
accacggtgataagtttaaacccgctgatcagcctcgactgtgc
CAR-T E6 CD8/CD8/CD28/4-1BB/CD3z sequence:
N-CD8ls-huMNE6scFv-CD8ecd fragment- CD8 transmembrane- CD28- 4-1BB- CD3zeta-C
(DNA)
(SEQ ID NO: 303)
atggccctgcccgtgaccgctttgctgctccccctggcgctgctgctgcacgccgccaggccagaggtccagctggttgag
agtggcggtgggctggttaagcctggcggctccctgcggctgagctgcgccgcgagtggatttactttcagccgatatggg
atgagttgggtgcggcaagctcccgggaagaggctggaatgggtctcaacaatctccggggggggcacttacatctattac
cccgactcagtcaaggggagatttaccatttcacgagacaacgctaagaataccctgtatttgcagatgaattctctgaga
gcagaggacacagctgtttactattgtacccgcgacaactatggcaggaactacgactacggtatggactattggggacaa
gggacattggttacagtgagcagtggcggcgggggcagcggaggaggaggcagcggtggggggggcagcgagatagtgctc
acgcagtcacccgcgactctcagtctctcacctggggaacgagctaccctgacgtgctctgctacctcctcagtgtcatat
attcactggtatcagcaacggcccgggcagtcccctagattgctcatttatagtacctctaatctggcctcaggtatccct
gcacgattttctggatctggttcaggttctgattacaccctcactatctctagcctggagcctgaagactttgccgtttat
tactgccagcagaggtctagctccccattcacctttgggagtgggaccaaggttgaaattaaaacgacaaccccggccccc
agaccaccaacgccagcccccaccatcgccagccaacccctgtctctgagaccagaagcctgtaggcctgccgccggtgga
gctgtgcacacaagaggactggatttcgcctgtgatatctacatttgggccccgctcgcaggcacatgtggagtgctcctc
ctctccctggtgattaccctgtactgcagaagcaagcggtctcggctcctgcattctgattacatgaacatgaccccaaga
agaccaggccccaccaggaaacattaccagccctacgctccgccacgcgacttcgctgcctaccggtccaaaaggggccgc
aaaaaactcctttacatttttaagcagccttttatgaggccagtacagacgactcaagaggaagacgggtgctcatgccgc
tttcctgaggaggaggaaggagggtgcgaactgcgcgttaagttctcccgatcagccgacgcgcctgcttacaagcagggc
cagaaccaactgtacaacgagctgaatctcggtagacgggaagagtacgacgtgttggacaaacggagaggccgcgaccca
gaaatgggcggcaagcctcgcaggaaaaacccccaggagggactgtacaatgagttgcagaaagataagatggcagaagct
tatagcgagatcggaatgaagggggaaaggagacgagggaaaggacacgacggcctttatcagggcctgtccacagcaaca
aaagatacgtatgacgccctccatatgcaggcacttccaccacggtgataa
(amino acids)
(SEQ ID NO: 304)
MALPVTALLLPLALLLHAARPEVQLVESGGGLVKPGGSLRLSCAASGFTFSRYGMSWVRQAPGKRLEWVSTISGGGTYIY
YPDSVKGRFTISRDNAKNTLYLQMNSLRAEDTAVYYCTRDNYGRNYDYGMDYWGQGTLVTVSSGGGGSGGGGSGGGGSEI
VLTQSPATLSLSPGERATLTCSATSSVSYIHWYQQRPGQSPRLLIYSTSNLASGIPARFSGSGSGSDYTLTISSLEPEDF
AVYYCQQRSSSPFTFGSGTKVEIKTTTPAPRPPTPAPTIASQPLSLRPEACRPAAGGAVHTRGLDFACDIYIWAPLAGTC
GVLLLSLVITLYCRSKRSRLLHSDYMNMTPRRPGPTRKHYQPYAPPRDFAAYRSKRGRKKLLYIFKQPFMRPVQTTQEED
GCSCRFPEEEEGGCELRVKFSRSADAPAYKQGQNQLYNELNLGRREEYDVLDKRRGRDPEMGGKPRRKNPQEGLYNELQK
DKMAEAYSEIGMKGERRRGKGHDGLYQGLSTATKDTYDALHMQALPPR**
CAR-T E6 CD28/4-1BB/CD3z gBLOCK sequence:
(DNA)
(SEQ ID NO: 305)
atagggagacccaagctggctagttaagcttggtaccgagggccaccatggccctgcccgtgaccgctttgctgctccccc
tggcgctgctgctgcacgccgccaggccagaggtccagctggttgagagtggcggtgggctggttaagcctggcggctccc
tgcggctgagctgcgccgcgagtggatttactttcagccgatatgggatgagttgggtgcggcaagctcccgggaagaggc
tggaatgggtctcaacaatctccggggggggcacttacatctattaccccgactcagtcaaggggagatttaccatttcac
gagacaacgctaagaataccctgtatttgcagatgaattctctgagagcagaggacacagctgtttactattgtacccgcg
acaactatggcaggaactacgactacggtatggactattggggacaagggacattggttacagtgagcagtggcggcgggg
gcagcggaggaggaggcagcggtggggggggcagcgagatagtgctcacgcagtcacccgcgactctcagtctctcacctg
gggaacgagctaccctgacgtgctctgctacctcctcagtgtcatatattcactggtatcagcaacggcccgggcagtccc
ctagattgctcatttatagtacctctaatctggcctcaggtatccctgcacgattttctggatctggttcaggttctgatt
acaccctcactatctctagcctggagcctgaagactttgccgtttattactgccagcagaggtctagctccccattcacct
ttgggagtgggaccaaggttgaaattaaaacgacaaccccggcccccagaccaccaacgccagcccccaccatcgccagcc
aacccctgtctctgagaccagaagcctgtaggcctgccgccggtggagctgtgcacacaagaggactggatttcgcctgtg
atatctacatttgggccccgctcgcaggcacatgtggagtgctcctcctctccctggtgattaccctgtactgcagaagca
agcggtctcggctcctgcattctgattacatgaacatgaccccaagaagaccaggccccaccaggaaacattaccagccct
acgctccgccacgcgacttcgctgcctaccggtccaaaaggggccgcaaaaaactcctttacatttttaagcagcctttta
tgaggccagtacagacgactcaagaggaagacgggtgctcatgccgctttcctgaggaggaggaaggagggtgcgaactgc
gcgttaagttctcccgatcagccgacgcgcctgcttacaagcagggccagaaccaactgtacaacgagctgaatctcggta
gacgggaagagtacgacgtgttggacaaacggagaggccgcgacccagaaatgggcggcaagcctcgcaggaaaaaccccc
aggagggactgtacaatgagttgcagaaagataagatggcagaagcttatagcgagatcggaatgaagggggaaaggagac
gagggaaaggacacgacggcctttatcagggcctgtccacagcaacaaaagatacgtatgacgccctccatatgcaggcac
ttccaccacggtgataagtttaaacccgctgatcagcctcgactgtgc
CAR-T C2 CD8/CD8/CD28/4-1BB/CD3z sequence:
N-CD8ls-huMNC2scFv-CD8ecd fragment- CD8 transmembrane- CD28- 4-1BB- CD3zeta-C
(DNA)
(SEQ ID NO: 306)
atggccttgccagtgacggccctgctgctgccattggctcttctgttgcacgctgccaggcctgaagtgcagctcgtagag
agtggcgggggactggtgaagcccggtggaagcctcagactcagttgcgccgcctcaggtttcactttttcaggttacgcc
atgtcctgggtaagacaggcaccggggaaaggactcgagtgggtgtctactatcagctcaggaggcacttatatatattat
cctgactctgtaaaaggccgatttacgatttctcgcgacaatgcaaagaactccctctacctccaaatgaacagtcttagg
gcagaagacactgctgtatactattgtgcacgcctcggcggcgacaactactacgagtactttgacgtgtgggggaaaggg
actaccgtgacagtttcaagcggaggaggtggctcaggtggaggcgggtcaggggggggaggaagtgatattgtgctcaca
caatccccagcctccctggctgtgtctcccggccaacgcgctacaattacatgtcgggcctccaaaagcgtgagcaccagc
ggctacagctacatgcactggtatcaacagaaaccaggacaaccccccaaactgttgatttatctcgcttcaaacttggag
tccggcgtgcctgcgcgcttttcagggagtgggagcggcacagattttacgctgactatcaaccccgtagaagcaaacgat
acagcgaattattattgtcaacattcccgggaactcccctttacgttcggcgggggcacaaaggtcgaaattaagagaacc
acgacaaccccggcccccagaccaccaacgccagcccccaccatcgccagccaacccctgtctctgagaccagaagcctgt
aggcctgccgccggtggagctgtgcacacaagaggactggatttcgcctgtgatatctacatttgggccccgctcgcaggc
acatgtggagtgctcctcctctccctggtgattaccctgtactgcagaagcaagcggtctcggctcctgcattctgattac
atgaacatgaccccaagaagaccaggccccaccaggaaacattaccagccctacgctccgccacgcgacttcgctgcctac
cggtccaaaaggggccgcaaaaaactcctttacatttttaagcagccttttatgaggccagtacagacgactcaagaggaa
gacgggtgctcatgccgctttcctgaggaggaggaaggagggtgcgaactgcgcgttaagttctcccgatcagccgacgcg
cctgcttacaagcagggccagaaccaactgtacaacgagctgaatctcggtagacgggaagagtacgacgtgttggacaaa
cggagaggccgcgacccagaaatgggcggcaagcctcgcaggaaaaacccccaggagggactgtacaatgagttgcagaaa
gataagatggcagaagcttatagcgagatcggaatgaagggggaaaggagacgagggaaaggacacgacggcctttatcag
ggcctgtccacagcaacaaaagatacgtatgacgccctccatatgcaggcacttccaccacggtgataa
(amino acids)
(SEQ ID NO: 307)
EVQLVESGGGLVKPGGSLRLSCAASGFTFSGYAMSWVRQAPGKGLEWVSTISSGGTYIYYPDSVKGRFTISRDNAKNSLYL
QMNSLRAEDTAVYYCARLGGDNYYEYFDVWGKGTTVTVSSGGGGSGGGGSGGGGSDIVLTQSPASLAVSPGQRATITCRAS
KSVSTSGYSYMHWYQQKPGQPPKLLIYLASNLESGVPARFSGSGSGTDFTLTINPVEANDTANYYCQHSRELPFTFGGGTK
VEIKRTTTTPAPRPPTPAPTIASQPLSLRPEACRPAAGGAVHTRGLDFACDIYIWAPLAGTCGVLLLSLVITLYCRSKRSR
LLHSDYMNMTPRRPGPTRKHYQPYAPPRDFAAYRSKRGRKKLLYIFKQPFMRPVQTTQEEDGCSCRFPEEEEGGCELRVKF
SRSADAPAYKQGQNQLYNELNLGRREEYDVLDKRRGRDPEMGGKPRRKNPQEGLYNELQKDKMAEAYSEIGMKGERRRGKG
HDGLYQGLSTATKDTYDALHMQALPPR**
CAR-T C2-1 gBLOCK sequence:
(DNA)
(SEQ ID NO: 308)
atagggagacccaagctggctagttaagcttggtaccgagggccaccatggccttgccagtgacggccctgctgctgccat
tggctcttctgttgcacgctgccaggcctgaagtgcagctcgtagagagtggcgggggactggtgaagcccggtggaagcc
tcagactcagttgcgccgcctcaggtttcactttttcaggttacgccatgtcctgggtaagacaggcaccggggaaaggac
tcgagtgggtgtctactatcagctcaggaggcacttatatatattatcctgactctgtaaaaggccgatttacgatttctc
gcgacaatgcaaagaactccctctacctccaaatgaacagtcttagggcagaagacactgctgtatactattgtgcacgcc
tcggcggcgacaactactacgagtactttgacgtgtgggggaaagggactaccgtgacagtttcaagcggaggaggtggct
caggtggaggcgggtcaggggggggaggaagtgatattgtgctcacacaatccccagcctccctggc
CAR-T C2-2 gBLOCK sequence:
(DNA)
(SEQ ID NO: 309)
aagtgatattgtgctcacacaatccccagcctccctggctgtgtctcccggccaacgcgctacaattacatgtcgggcctc
caaaagcgtgagcaccagcggctacagctacatgcactggtatcaacagaaaccaggacaaccccccaaactgttgattta
tctcgcttcaaacttggagtccggcgtgcctgcgcgcttttcagggagtgggagcggcacagattttacgctgactatcaa
ccccgtagaagcaaacgatacagcgaattattattgtcaacattcccgggaactcccctttacgttcggcgggggcacaaa
ggtcgaaattaagagaaccacgacaaccccggcccccagaccaccaacgccagcccccaccatcgccagccaacccctgtc
tctgagaccagaagcctgtaggcctgccgccggtggagctgtgcacacaagaggactggatttcgcctgtgatatctacat
ttgggccccgctcgcaggcacatgtggagtgc
CAR E6 Fc/8/4-1BB/CD3z sequence:
N-CD8ls-huMNE6scFv-Human IgG1 Fc- CD8 transmembrane- 4-1BB- CD3zeta-C
(DNA)
(SEQ ID NO: 310)
atggccctgcccgtgaccgctttgctgctccccctggcgctgctgctgcacgccgccaggccagaggtccagctggttgag
agtggcggtgggctggttaagcctggcggctccctgcggctgagctgcgccgcgagtggatttactttcagccgatatggg
atgagttgggtgcggcaagctcccgggaagaggctggaatgggtctcaacaatctccggggggggcacttacatctattac
cccgactcagtcaaggggagatttaccatttcacgagacaacgctaagaataccctgtatttgcagatgaattctctgaga
gcagaggacacagctgtttactattgtacccgcgacaactatggcaggaactacgactacggtatggactattggggacaa
gggacattggttacagtgagcagtggcggcgggggcagcggaggaggaggcagcggtggcggaggcagcgagatagtgctc
acgcagtcacccgcgactctcagtctctcacctggggaacgagctaccctgacgtgctctgctacctcctcagtgtcatat
attcactggtatcagcaacggcccgggcagtcccctagattgctcatttatagtacctctaatctggcctcaggtatccct
gcacgattttctggatctggttcaggttctgattacaccctcactatctctagcctggagcctgaagactttgccgtttat
tactgccagcagaggtctagctccccattcacctttgggagtgggaccaaggttgaaattaaagagcccaaatcttgtgac
aaaactcacacatgcccaccgtgcccagcacctgaactcctggggggaccgtcagtcttcctcttccccccaaaacccaag
gacaccctcatgatctcccggacccctgaggtcacatgcgtggtggtggacgtgagccacgaagaccctgaggtcaagttc
aactggtacgtggacggcgtggaggtgcataatgccaagacaaagccgcgggaggagcagtacaacagcacgtaccgtgtg
gtcagcgtcctcaccgtcctgcaccaggactggctgaatggcaaggagtacaagtgcaaggtctccaacaaagccctccca
gcccccatcgagaaaaccatctccaaagccaaagggcagccccgagaaccacaggtgtacaccctgcccccatcccgggag
gagatgaccaagaaccaggtcagcctgacctgcctggtcaaaggcttctatcccagcgacatcgccgtggagtgggagagc
aatgggcagccggagaacaactacaagaccacgcctcccgtgctggactccgacggctccttcttcctctacagcaagctc
accgtggacaagagcaggtggcagcaggggaacgtcttctcatgctccgtgatgcatgaggctctgcacaaccactacacg
cagaagagcctctccctgtctccgggtaaaatctacatttgggccccgctcgcaggcacatgtggagtgctcctcctctcc
ctggtgattaccctgtactgcaaaaggggccgcaaaaaactcctttacatttttaagcagccttttatgaggccagtacag
acgactcaagaggaagacgggtgctcatgccgctttcctgaggaggaggaaggagggtgcgaactgcgcgttaagttctcc
cgatcagccgacgcgcctgcttacaagcagggccagaaccaactgtacaacgagctgaatctcggtagacgggaagagtac
gacgtgttggacaaacggagaggccgcgacccagaaatgggcggcaagcctcgcaggaaaaacccccaggagggactgtac
aatgagttgcagaaagataagatggcagaagcttatagcgagatcggaatgaagggggaaaggagacgagggaaaggacac
gacggcctttatcagggcctgtccacagcaacaaaagatacgtatgacgccctccatatgcaggcacttccaccacggtga
taa
(amino acids)
(SEQ ID NO: 311)
MALPVTALLLPLALLLHAARPEVQLVESGGGLVKPGGSLRLSCAASGFTFSRYGMSWVRQAPGKRLEWVSTISGGGTYIY
YPDSVKGRFTISRDNAKNTLYLQMNSLRAEDTAVYYCTRDNYGRNYDYGMDYWGQGTLVTVSSGGGGSGGGGSGGGGSEI
VLTQSPATLSLSPGERATLTCSATSSVSYIHWYQQRPGQSPRLLIYSTSNLASGIPARFSGSGSGSDYTLTISSLEPEDF
AVYYCQQRSSSPFTFGSGTKVEIKEPKSCDKTHTCPPCPAPELLGGPSVFLFPPKPKDTLMISRTPEVTCVVVDVSHEDP
EVKFNWYVDGVEVHNAKTKPREEQYNSTYRVVSVLTVLHQDWLNGKEYKCKVSNKALPAPIEKTISKAKGQPREPQVYTL
PPSREEMTKNQVSLTCLVKGFYPSDIAVEWESNGQPENNYKTTPPVLDSDGSFFLYSKLTVDKSRWQQGNVFSCSVMHEA
LHNHYTQKSLSLSPGKIYIWAPLAGTCGVLLLSLVITLYCKRGRKKLLYIFKQPFMRPVQTTQEEDGCSCRFPEEEEGGC
ELRVKFSRSADAPAYKQGQNQLYNELNLGRREEYDVLDKRRGRDPEMGGKPRRKNPQEGLYNELQKDKMAEAYSEIGMKG
ERRRGKGHDGLYQGLSTATKDTYDALHMQALPPR**
E6 CAR pCDH gBLOCK sequence:
(DNA)
(SEQ ID NO: 312)
acgctgttttgacctccatagaagattctagagctagctgtagagcttggtaccgagggccaccatggccctgcccgtgac
cgctttgctgctccccctggcgctgctgctgcacgccgccaggccagaggtccagctggttgagagtggcggtgggctggt
taagcctggcggctccctgcggctgagctgcgccgcgagtggatttactttcagccgatatgggatgagttgggtgcggca
agctcccgggaagaggctggaatgggtctcaacaatctccggggggggcacttacatctattaccccgactcagtcaaggg
gagatttaccatttcacgagacaacgctaagaataccctgtatttgcagatgaattctctgagagcagaggacacagctgt
ttactattgtacccgcgacaactatggcaggaactacgactacggtatggactattggggacaagggacattggttacagt
gagcagtggcggcgggggcagcggaggaggaggcagcggtggcggaggcagcgagatagtgctcacgcagtcacccgcgac
tctcagtctctcacctggggaacgagctaccctgacgtgctctgctacctcctcagtgtcatatattcactggtatcagca
acggcccgggcagtcccctagattgctcatttatagtacctctaatctggcctcaggtatccctgc
E6 CAR Fc pCDH gBLOCK sequence:
(DNA)
(SEQ ID NO: 313)
agtacctctaatctggcctcaggtatccctgcacgattttctggatctggttcaggttctgattacaccctcactatctct
agcctggagcctgaagactttgccgtttattactgccagcagaggtctagctccccattcacctttgggagtgggaccaag
gttgaaattaaagagcccaaatcttgtgacaaaactcacacatgcccaccgtgcccagcacctgaactcctggggggaccg
tcagtcttcctcttccccccaaaacccaaggacaccctcatgatctcccggacccctgaggtcacatgcgtggtggtggac
gtgagccacgaagaccctgaggtcaagttcaactggtacgtggacggcgtggaggtgcataatgccaagacaaagccgcgg
gaggagcagtacaacagcacgtaccgtgtggtcagcgtcctcaccgtcctgcaccaggactggctgaatggcaaggagtac
aagtgcaaggtctccaacaaagccctcccagcccccatcgagaaaaccatctccaaagccaaagggcagccccgagaacca
caggtgtacaccctgcccccatcccgggaggagatgaccaagaaccaggtcagcctgacctgcctggtcaaaggcttctat
cccagcgacatcgccgtggagtgggagagcaatgggcagccggagaacaactacaagaccacgcctcccgtgctg
E6 CAR 8BB3 pCDH gBLOCK sequence:
(DNA)
(SEQ ID NO: 314)
agaacaactacaagaccacgcctcccgtgctggactccgacggctccttcttcctctacagcaagctcaccgtggacaaga
gcaggtggcagcaggggaacgtcttctcatgctccgtgatgcatgaggctctgcacaaccactacacgcagaagagcctct
ccctgtctccgggtaaaatctacatttgggccccgctcgcaggcacatgtggagtgctcctcctctccctggtgattaccc
tgtactgcaaaaggggccgcaaaaaactcctttacatttttaagcagccttttatgaggccagtacagacgactcaagagg
aagacgggtgctcatgccgctttcctgaggaggaggaaggagggtgcgaactgcgcgttaagttctcccgatcagccgacg
cgcctgcttacaagcagggccagaaccaactgtacaacgagctgaatctcggtagacgggaagagtacgacgtgttggaca
aacggagaggccgcgacccagaaatgggcggcaagcctcgcaggaaaaacccccaggagggactgtacaatgagttgcaga
aagataagatggcagaagcttatagcgagatcggaatgaagggggaaaggagacgagggaaaggacacgacggcctttatc
agggcctgtccacagcaacaaaagatacgtatgacgccctccatatgcaggcacttccaccacggtgataagtttaaaccc
gctgatcaggcggccgcgaaggatctgcgatcgctccggtgcccgtcag
CAR E6 FcH/8/4-1BB/CD3z sequence:
N-CD8ls-huMNE6scFv-Human IgG1 hingeless Fc Y407R- CD8 transmembrane- 4-1BB-
CD3zeta-C
(DNA)
(SEQ ID NO: 315)
atggccctgcccgtgaccgctttgctgctccccctggcgctgctgctgcacgccgccaggccagaggtccagctggttgag
agtggcggtgggctggttaagcctggcggctccctgcggctgagctgcgccgcgagtggatttactttcagccgatatggg
atgagttgggtgcggcaagctcccgggaagaggctggaatgggtctcaacaatctccggggggggcacttacatctattac
cccgactcagtcaaggggagatttaccatttcacgagacaacgctaagaataccctgtatttgcagatgaattctctgaga
gcagaggacacagctgtttactattgtacccgcgacaactatggcaggaactacgactacggtatggactattggggacaa
gggacattggttacagtgagcagtggcggcgggggcagcggaggaggaggcagcggtggcggaggcagcgagatagtgctc
acgcagtcacccgcgactctcagtctctcacctggggaacgagctaccctgacgtgctctgctacctcctcagtgtcatat
attcactggtatcagcaacggcccgggcagtcccctagattgctcatttatagtacctctaatctggcctcaggtatccct
gcacgattttctggatctggttcaggttctgattacaccctcactatctctagcctggagcctgaagactttgccgtttat
tactgccagcagaggtctagctccccattcacctttgggagtgggaccaaggttgaaattaaagcacctgaactcctgggg
ggaccgtcagtcttcctcttccccccaaaacccaaggacaccctcatgatctcccggacccctgaggtcacatgcgtggtg
gtggacgtgagccacgaagaccctgaggtcaagttcaactggtacgtggacggcgtggaggtgcataatgccaagacaaag
ccgcgggaggagcagtacaacagcacgtaccgtgtggtcagcgtcctcaccgtcctgcaccaggactggctgaatggcaag
gagtacaagtgcaaggtctccaacaaagccctcccagcccccatcgagaaaaccatctccaaagccaaagggcagccccga
gaaccacaggtgtacaccctgcccccatcccgggaggagatgaccaagaaccaggtcagcctgacctgcctggtcaaaggc
ttctatcccagcgacatcgccgtggagtgggagagcaatgggcagccggagaacaactacaagaccacgcctcccgtgctg
gactccgacggctccttcttcctctacagcaagctcaccgtggacaagagcaggtggcagcaggggaacgtcttctcatgc
tccgtgatgcatgaggctctgcacaaccactacacgcagaagagcctctccctgtctccgggtaaaatctacatttgggcc
ccgctcgcaggcacatgtggagtgctcctcctctccctggtgattaccctgtactgcaaaaggggccgcaaaaaactcctt
tacatttttaagcagccttttatgaggccagtacagacgactcaagaggaagacgggtgctcatgccgctttcctgaggag
gaggaaggagggtgcgaactgcgcgttaagttctcccgatcagccgacgcgcctgcttacaagcagggccagaaccaactg
tacaacgagctgaatctcggtagacgggaagagtacgacgtgttggacaaacggagaggccgcgacccagaaatgggcggc
aagcctcgcaggaaaaacccccaggagggactgtacaatgagttgcagaaagataagatggcagaagcttatagcgagatc
ggaatgaagggggaaaggagacgagggaaaggacacgacggcctttatcagggcctgtccacagcaacaaaagatacgtat
gacgccctccatatgcaggcacttccaccacggtgataa
(amino acids)
(SEQ ID NO: 316)
MALPVTALLLPLALLLHAARPEVQLVESGGGLVKPGGSLRLSCAASGFTFSRYGMSWVRQAPGKRLEWVSTISGGGTYIY
YPDSVKGRFTISRDNAKNTLYLQMNSLRAEDTAVYYCTRDNYGRNYDYGMDYWGQGTLVTVSSGGGGSGGGGSGGGGSEI
VLTQSPATLSLSPGERATLTCSATSSVSYIHWYQQRPGQSPRLLIYSTSNLASGIPARFSGSGSGSDYTLTISSLEPEDF
AVYYCQQRSSSPFTFGSGTKVEIKAPELLGGPSVFLFPPKPKDTLMISRTPEVTCVVVDVSHEDPEVKFNWYVDGVEVHN
AKTKPREEQYNSTYRVVSVLTVLHQDWLNGKEYKCKVSNKALPAPIEKTISKAKGQPREPQVYTLPPSREEMTKNQVSLT
CLVKGFYPSDIAVEWESNGQPENNYKTTPPVLDSDGSFFLYSKLTVDKSRWQQGNVFSCSVMHEALHNHYTQKSLSLSPG
KIYIWAPLAGTCGVLLLSLVITLYCKRGRKKLLYIFKQPFMRPVQTTQEEDGCSCRFPEEEEGGCELRVKFSRSADAPAY
KQGQNQLYNELNLGRREEYDVLDKRRGRDPEMGGKPRRKNPQEGLYNELQKDKMAEAYSEIGMKGERRRGKGHDGLYQGL
STATKDTYDALHMQALPPR**
E6 CAR FcH pCDH gBLOCK sequence:
(DNA)
(SEQ ID NO: 317)
agtacctctaatctggcctcaggtatccctgcacgattttctggatctggttcaggttctgattacaccctcactatctct
agcctggagcctgaagactttgccgtttattactgccagcagaggtctagctccccattcacctttgggagtgggaccaag
gttgaaattaaagcacctgaactcctggggggaccgtcagtcttcctcttccccccaaaacccaaggacaccctcatgatc
tcccggacccctgaggtcacatgcgtggtggtggacgtgagccacgaagaccctgaggtcaagttcaactggtacgtggac
ggcgtggaggtgcataatgccaagacaaagccgcgggaggagcagtacaacagcacgtaccgtgtggtcagcgtcctcacc
gtcctgcaccaggactggctgaatggcaaggagtacaagtgcaaggtctccaacaaagccctcccagcccccatcgagaaa
accatctccaaagccaaagggcagccccgagaaccacaggtgtacaccctgcccccatcccgggaggagatgaccaagaac
caggtcagcctgacctgcctggtcaaaggcttctatcccagcgacatcgccgtggagtgggagagcaatgggcagccggag
aacaactacaagaccacgcctcccgtgctg
CAR E6 Fc/4/4-1BB/CD3z sequence:
N-CD8ls-huMNE6scFv-Human IgG1 Fc- CD4 transmembrane- CD28- 4-1BB- CD3zeta-C
(DNA)
(SEQ ID NO: 318)
atggccctgcccgtgaccgctttgctgctccccctggcgctgctgctgcacgccgccaggccagaggtccagctggttgag
agtggcggtgggctggttaagcctggcggctccctgcggctgagctgcgccgcgagtggatttactttcagccgatatggg
atgagttgggtgcggcaagctcccgggaagaggctggaatgggtctcaacaatctccggggggggcacttacatctattac
cccgactcagtcaaggggagatttaccatttcacgagacaacgctaagaataccctgtatttgcagatgaattctctgaga
gcagaggacacagctgtttactattgtacccgcgacaactatggcaggaactacgactacggtatggactattggggacaa
gggacattggttacagtgagcagtggcggcgggggcagcggaggaggaggcagcggtggcggaggcagcgagatagtgctc
acgcagtcacccgcgactctcagtctctcacctggggaacgagctaccctgacgtgctctgctacctcctcagtgtcatat
attcactggtatcagcaacggcccgggcagtcccctagattgctcatttatagtacctctaatctggcctcaggtatccct
gcacgattttctggatctggttcaggttctgattacaccctcactatctctagcctggagcctgaagactttgccgtttat
tactgccagcagaggtctagctccccattcacctttgggagtgggaccaaggttgaaattaaagagcccaaatcttgtgac
aaaactcacacatgcccaccgtgcccagcacctgaactcctggggggaccgtcagtcttcctcttccccccaaaacccaag
gacaccctcatgatctcccggacccctgaggtcacatgcgtggtggtggacgtgagccacgaagaccctgaggtcaagttc
aactggtacgtggacggcgtggaggtgcataatgccaagacaaagccgcgggaggagcagtacaacagcacgtaccgtgtg
gtcagcgtcctcaccgtcctgcaccaggactggctgaatggcaaggagtacaagtgcaaggtctccaacaaagccctccca
gcccccatcgagaaaaccatctccaaagccaaagggcagccccgagaaccacaggtgtacaccctgcccccatcccgggag
gagatgaccaagaaccaggtcagcctgacctgcctggtcaaaggcttctatcccagcgacatcgccgtggagtgggagagc
aatgggcagccggagaacaactacaagaccacgcctcccgtgctggactccgacggctccttcttcctctacagcaagctc
accgtggacaagagcaggtggcagcaggggaacgtcttctcatgctccgtgatgcatgaggctctgcacaaccactacacg
cagaagagcctctccctgtctccgggtaaaatggccctgattgtgctggggggcgtcgccggcctcctgcttttcattggg
ctaggcatcttcttcaaaaggggccgcaaaaaactcctttacatttttaagcagccttttatgaggccagtacagacgact
caagaggaagacgggtgctcatgccgctttcctgaggaggaggaaggagggtgcgaactgcgcgttaagttctcccgatca
gccgacgcgcctgcttacaagcagggccagaaccaactgtacaacgagctgaatctcggtagacgggaagagtacgacgtg
ttggacaaacggagaggccgcgacccagaaatgggcggcaagcctcgcaggaaaaacccccaggagggactgtacaatgag
ttgcagaaagataagatggcagaagcttatagcgagatcggaatgaagggggaaaggagacgagggaaaggacacgacggc
ctttatcagggcctgtccacagcaacaaaagatacgtatgacgccctccatatgcaggcacttccaccacggtgataa
(amino acids)
(SEQ ID NO: 319)
MALPVTALLLPLALLLHAARPEVQLVESGGGLVKPGGSLRLSCAASGFTFSRYGMSWVRQAPGKRLEWVSTISGGGTYIY
YPDSVKGRFTISRDNAKNTLYLQMNSLRAEDTAVYYCTRDNYGRNYDYGMDYWGQGTLVTVSSGGGGSGGGGSGGGGSEI
VLTQSPATLSLSPGERATLTCSATSSVSYIHWYQQRPGQSPRLLIYSTSNLASGIPARFSGSGSGSDYTLTISSLEPEDF
AVYYCQQRSSSPFTFGSGTKVEIKEPKSCDKTHTCPPCPAPELLGGPSVFLFPPKPKDTLMISRTPEVTCVVVDVSHEDP
EVKFNWYVDGVEVHNAKTKPREEQYNSTYRVVSVLTVLHQDWLNGKEYKCKVSNKALPAPIEKTISKAKGQPREPQVYTL
PPSREEMTKNQVSLTCLVKGFYPSDIAVEWESNGQPENNYKTTPPVLDSDGSFFLYSKLTVDKSRWQQGNVFSCSVMHEA
LHNHYTQKSLSLSPGKMALIVLGGVAGLLLFIGLGIFFKRGRKKLLYIFKQPFMRPVQTTQEEDGCSCRFPEEEEGGCEL
RVKFSRSADAPAYKQGQNQLYNELNLGRREEYDVLDKRRGRDPEMGGKPRRKNPQEGLYNELQKDKMAEAYSEIGMKGER
RRGKGHDGLYQGLSTATKDTYDALHMQALPPR**
E6 CAR 44BB3 pCDH gBLOCK sequence:
(DNA)
(SEQ ID NO: 320)
agaacaactacaagaccacgcctcccgtgctggactccgacggctccttcttcctctacagcaagctcaccgtggacaaga
gcaggtggcagcaggggaacgtcttctcatgctccgtgatgcatgaggctctgcacaaccactacacgcagaagagcctct
ccctgtctccgggtaaaatggccctgattgtgctggggggcgtcgccggcctcctgcttttcattgggctaggcatcttct
tcaaaaggggccgcaaaaaactcctttacatttttaagcagccttttatgaggccagtacagacgactcaagaggaagacg
ggtgctcatgccgctttcctgaggaggaggaaggagggtgcgaactgcgcgttaagttctcccgatcagccgacgcgcctg
cttacaagcagggccagaaccaactgtacaacgagctgaatctcggtagacgggaagagtacgacgtgttggacaaacgga
gaggccgcgacccagaaatgggcggcaagcctcgcaggaaaaacccccaggagggactgtacaatgagttgcagaaagata
agatggcagaagcttatagcgagatcggaatgaagggggaaaggagacgagggaaaggacacgacggcctttatcagggcc
tgtccacagcaacaaaagatacgtatgacgccctccatatgcaggcacttccaccacggtgataagtttaaacccgctgat
caggcggccgcgaaggatctgcgatcgctccggtgcccgtcag
CAR E6 FcH/4/4-1BB/CD3z sequence:
N-CD8ls-huMNE6scFv-Human IgG1 hingeless Fc Y407R- CD4 transmembrane- CD28-
4-1BB-CD3zeta-C
(DNA)
(SEQ ID NO: 321)
atggccctgcccgtgaccgctttgctgctccccctggcgctgctgctgcacgccgccaggccagaggtccagctggttgag
agtggcggtgggctggttaagcctggcggctccctgcggctgagctgcgccgcgagtggatttactttcagccgatatggg
atgagttgggtgcggcaagctcccgggaagaggctggaatgggtctcaacaatctccggggggggcacttacatctattac
cccgactcagtcaaggggagatttaccatttcacgagacaacgctaagaataccctgtatttgcagatgaattctctgaga
gcagaggacacagctgtttactattgtacccgcgacaactatggcaggaactacgactacggtatggactattggggacaa
gggacattggttacagtgagcagtggcggcgggggcagcggaggaggaggcagcggtggcggaggcagcgagatagtgctc
acgcagtcacccgcgactctcagtctctcacctggggaacgagctaccctgacgtgctctgctacctcctcagtgtcatat
attcactggtatcagcaacggcccgggcagtcccctagattgctcatttatagtacctctaatctggcctcaggtatccct
gcacgattttctggatctggttcaggttctgattacaccctcactatctctagcctggagcctgaagactttgccgtttat
tactgccagcagaggtctagctccccattcacctttgggagtgggaccaaggttgaaattaaagcacctgaactcctgggg
ggaccgtcagtcttcctcttccccccaaaacccaaggacaccctcatgatctcccggacccctgaggtcacatgcgtggtg
gtggacgtgagccacgaagaccctgaggtcaagttcaactggtacgtggacggcgtggaggtgcataatgccaagacaaag
ccgcgggaggagcagtacaacagcacgtaccgtgtggtcagcgtcctcaccgtcctgcaccaggactggctgaatggcaag
gagtacaagtgcaaggtctccaacaaagccctcccagcccccatcgagaaaaccatctccaaagccaaagggcagccccga
gaaccacaggtgtacaccctgcccccatcccgggaggagatgaccaagaaccaggtcagcctgacctgcctggtcaaaggc
ttctatcccagcgacatcgccgtggagtgggagagcaatgggcagccggagaacaactacaagaccacgcctcccgtgctg
gactccgacggctccttcttcctctacagcaagctcaccgtggacaagagcaggtggcagcaggggaacgtcttctcatgc
tccgtgatgcatgaggctctgcacaaccactacacgcagaagagcctctccctgtctccgggtaaaatggccctgattgtg
ctggggggcgtcgccggcctcctgcttttcattgggctaggcatcttcttcaaaaggggccgcaaaaaactcctttacatt
tttaagcagccttttatgaggccagtacagacgactcaagaggaagacgggtgctcatgccgctttcctgaggaggaggaa
ggagggtgcgaactgcgcgttaagttctcccgatcagccgacgcgcctgcttacaagcagggccagaaccaactgtacaac
gagctgaatctcggtagacgggaagagtacgacgtgttggacaaacggagaggccgcgacccagaaatgggcggcaagcct
cgcaggaaaaacccccaggagggactgtacaatgagttgcagaaagataagatggcagaagcttatagcgagatcggaatg
aagggggaaaggagacgagggaaaggacacgacggcctttatcagggcctgtccacagcaacaaaagatacgtatgacgcc
ctccatatgcaggcacttccaccacggtgataa
(amino acids)
(SEQ ID NO: 322)
MALPVTALLLPLALLLHAARPEVQLVESGGGLVKPGGSLRLSCAASGFTFSRYGMSWVRQAPGKRLEWVSTISGGGTYIY
YPDSVKGRFTISRDNAKNTLYLQMNSLRAEDTAVYYCTRDNYGRNYDYGMDYWGQGTLVTVSSGGGGSGGGGSGGGGSEI
VLTQSPATLSLSPGERATLTCSATSSVSYIHWYQQRPGQSPRLLIYSTSNLASGIPARFSGSGSGSDYTLTISSLEPEDF
AVYYCQQRSSSPFTFGSGTKVEIKAPELLGGPSVFLFPPKPKDTLMISRTPEVTCVVVDVSHEDPEVKFNWYVDGVEVHN
AKTKPREEQYNSTYRVVSVLTVLHQDWLNGKEYKCKVSNKALPAPIEKTISKAKGQPREPQVYTLPPSREEMTKNQVSLT
CLVKGFYPSDIAVEWESNGQPENNYKTTPPVLDSDGSFFLYSKLTVDKSRWQQGNVFSCSVMHEALHNHYTQKSLSLSPG
KMALIVLGGVAGLLLFIGLGIFFKRGRKKLLYIFKQPFMRPVQTTQEEDGCSCRFPEEEEGGCELRVKFSRSADAPAYKQ
GQNQLYNELNLGRREEYDVLDKRRGRDPEMGGKPRRKNPQEGLYNELQKDKMAEAYSEIGMKGERRRGKGHDGLYQGLST
ATKDTYDALHMQALPPR**
CAR E6 IgD/8/4-1BB/CD3z sequence:
N-CD8ls-huMNE6scFv-IgD hinge region- CD8 transmembrane- 4-1BB- CD3zeta-C
(DNA)
(SEQ ID NO: 323)
atggccctgcccgtgaccgctttgctgctccccctggcgctgctgctgcacgccgccaggccagaggtccagctggttgag
agtggcggtgggctggttaagcctggcggctccctgcggctgagctgcgccgcgagtggatttactttcagccgatatggg
atgagttgggtgcggcaagctcccgggaagaggctggaatgggtctcaacaatctccggggggggcacttacatctattac
cccgactcagtcaaggggagatttaccatttcacgagacaacgctaagaataccctgtatttgcagatgaattctctgaga
gcagaggacacagctgtttactattgtacccgcgacaactatggcaggaactacgactacggtatggactattggggacaa
gggacattggttacagtgagcagtggcggcgggggcagcggaggaggaggcagcggtggcggaggcagcgagatagtgctc
acgcagtcacccgcgactctcagtctctcacctggggaacgagctaccctgacgtgctctgctacctcctcagtgtcatat
attcactggtatcagcaacggcccgggcagtcccctagattgctcatttatagtacctctaatctggcctcaggtatccct
gcacgattttctggatctggttcaggttctgattacaccctcactatctctagcctggagcctgaagactttgccgtttat
tactgccagcagaggtctagctccccattcacctttgggagtgggaccaaggttgaaattaaagagtctccaaaggcaca
ggcctcctcagtgcccactgcacaaccccaagcagagggcagcctcgccaaggcaaccacagccccagccaccacccgta
acacaggaagaggcggcgaagagaagaaaaaggagaaggagaaagaggaacaagaagagagagagacaaagacaccaatc
tacatttgggccccgctcgcaggcacatgtggagtgctcctcctctccctggtgattaccctgtactgcaaaaggggccgc
aaaaaactcctttacatttttaagcagccttttatgaggccagtacagacgactcaagaggaagacgggtgctcatgccgc
tttcctgaggaggaggaaggagggtgcgaactgcgcgttaagttctcccgatcagccgacgcgcctgcttacaagcagggc
cagaaccaactgtacaacgagctgaatctcggtagacgggaagagtacgacgtgttggacaaacggagaggccgcgaccca
gaaatgggcggcaagcctcgcaggaaaaacccccaggagggactgtacaatgagttgcagaaagataagatggcagaagct
tatagcgagatcggaatgaagggggaaaggagacgagggaaaggacacgacggcctttatcagggcctgtccacagcaaca
aaagatacgtatgacgccctccatatgcaggcacttccaccacggtgataa
(amino acids)
(SEQ ID NO: 324)
MALPVTALLLPLALLLHAARPEVQLVESGGGLVKPGGSLRLSCAASGFTFSRYGMSWVRQAPGKRLEWVSTISGGGTYIY
YPDSVKGRFTISRDNAKNTLYLQMNSLRAEDTAVYYCTRDNYGRNYDYGMDYWGQGTLVTVSSGGGGSGGGGSGGGGSEI
VLTQSPATLSLSPGERATLTCSATSSVSYIHWYQQRPGQSPRLLIYSTSNLASGIPARFSGSGSGSDYTLTISSLEPEDF
AVYYCQQRSSSPFTFGSGTKVEIKESPKAQASSVPTAQPQAEGSLAKATTAPATTRNTGRGGEEKKKEKEKEEQEERETK
TPIYIWAPLAGTCGVLLLSLVITLYCKRGRKKLLYIFKQPFMRPVQTTQEEDGCSCRFPEEEEGGCELRVKFSRSADAPA
YKQGQNQLYNELNLGRREEYDVLDKRRGRDPEMGGKPRRKNPQEGLYNELQKDKMAEAYSEIGMKGERRRGKGHDGLYQG
LSTATKDTYDALHMQALPPR**
E6 CAR IgD8 pcDH gBLOCK sequence:
(DNA)
(SEQ ID NO: 325)
agtacctctaatctggcctcaggtatccctgcacgattttctggatctggttcaggttctgattacaccctcactatctct
agcctggagcctgaagactttgccgtttattactgccagcagaggtctagctccccattcacctttgggagtgggaccaag
gttgaaattaaagagtctccaaaggcacaggcctcctcagtgcccactgcacaaccccaagcagagggcagcctcgccaa
ggcaaccacagccccagccaccacccgtaacacaggaagaggcggcgaagagaagaaaaaggagaaggagaaagaggaac
aagaagagagagagacaaagacaccaatctacatttgggccccgctcgcaggcacatgtggagtgctcctcctctccctg
gtgattaccctgtactgcaaaaggggccgcaaaaaactcctttacatttttaagcagccttttatgaggccag
E6 CAR BB 3 pCDH gBLOCK sequence:
(DNA)
(SEQ ID NO: 326)
acatttttaagcagccttttatgaggccagtacagacgactcaagaggaagacgggtgctcatgccgctttcctgaggagg
aggaaggagggtgcgaactgcgcgttaagttctcccgatcagccgacgcgcctgcttacaagcagggccagaaccaactgt
acaacgagctgaatctcggtagacgggaagagtacgacgtgttggacaaacggagaggccgcgacccagaaatgggcggca
agcctcgcaggaaaaacccccaggagggactgtacaatgagttgcagaaagataagatggcagaagcttatagcgagatcg
gaatgaagggggaaaggagacgagggaaaggacacgacggcctttatcagggcctgtccacagcaacaaaagatacgtatg
acgccctccatatgcaggcacttccaccacggtgataagtttaaacccgctgatcaggcggccgcgaaggatctgcgatcg
ctccggtgcccgtcag
CAR E6 IgD/4/4-1BB/CD3z sequence:
N-CD8ls-huMNE6scFv-IgD hinge region- CD4 transmembrane- 4-1BB- CD3zeta-C
(DNA)
(SEQ ID NO: 327)
atggccctgcccgtgaccgctttgctgctccccctggcgctgctgctgcacgccgccaggccagaggtccagctggttgag
agtggcggtgggctggttaagcctggcggctccctgcggctgagctgcgccgcgagtggatttactttcagccgatatggg
atgagttgggtgcggcaagctcccgggaagaggctggaatgggtctcaacaatctccggggggggcacttacatctattac
cccgactcagtcaaggggagatttaccatttcacgagacaacgctaagaataccctgtatttgcagatgaattctctgaga
gcagaggacacagctgtttactattgtacccgcgacaactatggcaggaactacgactacggtatggactattggggacaa
gggacattggttacagtgagcagtggcggcgggggcagcggaggaggaggcagcggtggcggaggcagcgagatagtgctc
acgcagtcacccgcgactctcagtctctcacctggggaacgagctaccctgacgtgctctgctacctcctcagtgtcatat
attcactggtatcagcaacggcccgggcagtcccctagattgctcatttatagtacctctaatctggcctcaggtatccct
gcacgattttctggatctggttcaggttctgattacaccctcactatctctagcctggagcctgaagactttgccgtttat
tactgccagcagaggtctagctccccattcacctttgggagtgggaccaaggttgaaattaaagagtctccaaaggcaca
ggcctcctcagtgcccactgcacaaccccaagcagagggcagcctcgccaaggcaaccacagccccagccaccacccgta
acacaggaagaggcggcgaagagaagaaaaaggagaaggagaaagaggaacaagaagagagagagacaaagacaccaatg
gccctgattgtgctggggggcgtcgccggcctcctgcttttcattgggctaggcatcttcttcaaaaggggccgcaaaaaa
ctcctttacatttttaagcagccttttatgaggccagtacagacgactcaagaggaagacgggtgctcatgccgctttcct
gaggaggaggaaggagggtgcgaactgcgcgttaagttctcccgatcagccgacgcgcctgcttacaagcagggccagaac
caactgtacaacgagctgaatctcggtagacgggaagagtacgacgtgttggacaaacggagaggccgcgacccagaaatg
ggcggcaagcctcgcaggaaaaacccccaggagggactgtacaatgagttgcagaaagataagatggcagaagcttatagc
gagatcggaatgaagggggaaaggagacgagggaaaggacacgacggcctttatcagggcctgtccacagcaacaaaagat
acgtatgacgccctccatatgcaggcacttccaccacggtgataa
(amino acids)
(SEQ ID NO: 328)
MALPVTALLLPLALLLHAARPEVQLVESGGGLVKPGGSLRLSCAASGFTFSRYGMSWVRQAPGKRLEWVSTISGGGTYIY
YPDSVKGRFTISRDNAKNTLYLQMNSLRAEDTAVYYCTRDNYGRNYDYGMDYWGQGTLVTVSSGGGGSGGGGSGGGGSEI
VLTQSPATLSLSPGERATLTCSATSSVSYIHWYQQRPGQSPRLLIYSTSNLASGIPARFSGSGSGSDYTLTISSLEPEDF
AVYYCQQRSSSPFTFGSGTKVEIKESPKAQASSVPTAQPQAEGSLAKATTAPATTRNTGRGGEEKKKEKEKEEQEERETK
TPMALIVLGGVAGLLLFIGLGIFFKRGRKKLLYIFKQPFMRPVQTTQEEDGCSCRFPEEEEGGCELRVKFSRSADAPAYK
QGQNQLYNELNLGRREEYDVLDKRRGRDPEMGGKPRRKNPQEGLYNELQKDKMAEAYSEIGMKGERRRGKGHDGLYQGLS
TATKDTYDALHMQALPPR**
E6 CAR IgD4 pcDH gBLOCK sequence:
(DNA)
(SEQ ID NO: 329)
agtacctctaatctggcctcaggtatccctgcacgattttctggatctggttcaggttctgattacaccctcactatctct
agcctggagcctgaagactttgccgtttattactgccagcagaggtctagctccccattcacctttgggagtgggaccaag
gttgaaattaaagagtctccaaaggcacaggcctcctcagtgcccactgcacaaccccaagcagagggcagcctcgccaa
ggcaaccacagccccagccaccacccgtaacacaggaagaggcggcgaagagaagaaaaaggagaaggagaaagaggaac
aagaagagagagagacaaagacaccaatggccctgattgtgctggggggcgtcgccggcctcctgcttttcattgggcta
ggcatcttcttcaaaaggggccgcaaaaaactcctttacatttttaagcagccttttatgaggccag
CAR E6 X4/8/4-1BB/CD3z sequence:
N-CD8ls-huMNE6scFv- X4 linker- CD8 transmembrane- 4-1BB- CD3zeta-C
(DNA)
(SEQ ID NO: 330)
atggccctgcccgtgaccgctttgctgctccccctggcgctgctgctgcacgccgccaggccagaggtccagctggttgag
agtggcggtgggctggttaagcctggcggctccctgcggctgagctgcgccgcgagtggatttactttcagccgatatggg
atgagttgggtgcggcaagctcccgggaagaggctggaatgggtctcaacaatctccggggggggcacttacatctattac
cccgactcagtcaaggggagatttaccatttcacgagacaacgctaagaataccctgtatttgcagatgaattctctgaga
gcagaggacacagctgtttactattgtacccgcgacaactatggcaggaactacgactacggtatggactattggggacaa
gggacattggttacagtgagcagtggcggcgggggcagcggaggaggaggcagcggtggcggaggcagcgagatagtgctc
acgcagtcacccgcgactctcagtctctcacctggggaacgagctaccctgacgtgctctgctacctcctcagtgtcatat
attcactggtatcagcaacggcccgggcagtcccctagattgctcatttatagtacctctaatctggcctcaggtatccct
gcacgattttctggatctggttcaggttctgattacaccctcactatctctagcctggagcctgaagactttgccgtttat
tactgccagcagaggtctagctccccattcacctttgggagtgggaccaaggttgaaattaaagacaagacgcacaccaag
ccacctaaaccagctccagaactgctcggaggtcctggcaccggaaccggaggacctaccatcaaaccacctaagccacct
aagcctgctcctaacctgctcggaggacctatctacatttgggccccgctcgcaggcacatgtggagtgctcctcctctcc
ctggtgattaccctgtactgcaaaaggggccgcaaaaaactcctttacatttttaagcagccttttatgaggccagtacag
acgactcaagaggaagacgggtgctcatgccgctttcctgaggaggaggaaggagggtgcgaactgcgcgttaagttctcc
cgatcagccgacgcgcctgcttacaagcagggccagaaccaactgtacaacgagctgaatctcggtagacgggaagagtac
gacgtgttggacaaacggagaggccgcgacccagaaatgggcggcaagcctcgcaggaaaaacccccaggagggactgtac
aatgagttgcagaaagataagatggcagaagcttatagcgagatcggaatgaagggggaaaggagacgagggaaaggacac
gacggcctttatcagggcctgtccacagcaacaaaagatacgtatgacgccctccatatgcaggcacttccaccacggtga
taa
(amino acids)
(SEQ ID NO: 331)
MALPVTALLLPLALLLHAARPEVQLVESGGGLVKPGGSLRLSCAASGFTFSRYGMSWVRQAPGKRLEWVSTISGGGTYIY
YPDSVKGRFTISRDNAKNTLYLQMNSLRAEDTAVYYCTRDNYGRNYDYGMDYWGQGTLVTVSSGGGGSGGGGSGGGGSEI
VLTQSPATLSLSPGERATLTCSATSSVSYIHWYQQRPGQSPRLLIYSTSNLASGIPARFSGSGSGSDYTLTISSLEPEDF
AVYYCQQRSSSPFTFGSGTKVEIKDKTHTKPPKPAPELLGGPGTGTGGPTIKPPKPPKPAPNLLGGPIYIWAPLAGTCGV
LLLSLVITLYCKRGRKKLLYIFKQPFMRPVQTTQEEDGCSCRFPEEEEGGCELRVKFSRSADAPAYKQGQNQLYNELNLG
RREEYDVLDKRRGRDPEMGGKPRRKNPQEGLYNELQKDKMAEAYSEIGMKGERRRGKGHDGLYQGLSTATKDTYDALHMQ
ALPPR**
E6 CAR X48 pCDH gBLOCK sequence:
(DNA)
(SEQ ID NO: 332)
agtacctctaatctggcctcaggtatccctgcacgattttctggatctggttcaggttctgattacaccctcactatctct
agcctggagcctgaagactttgccgtttattactgccagcagaggtctagctccccattcacctttgggagtgggaccaag
gttgaaattaaagacaagacgcacaccaagccacctaaaccagctccagaactgctcggaggtcctggcaccggaaccgga
ggacctaccatcaaaccacctaagccacctaagcctgctcctaacctgctcggaggacctatctacatttgggccccgctc
gcaggcacatgtggagtgctcctcctctccctggtgattaccctgtactgcaaaaggggccgcaaaaaactcctttacatt
tttaagcagccttttatgaggccag
CAR E6 X4/4/4-1BB/CD3z sequence:
N-CD8ls-huMNE6scFv-X4 linker- CD4 transmembrane- 4-1BB- CD3zeta-C
(DNA)
(SEQ ID NO: 333)
atggccctgcccgtgaccgctttgctgctccccctggcgctgctgctgcacgccgccaggccagaggtccagctggttgag
agtggcggtgggctggttaagcctggcggctccctgcggctgagctgcgccgcgagtggatttactttcagccgatatggg
atgagttgggtgcggcaagctcccgggaagaggctggaatgggtctcaacaatctccggggggggcacttacatctattac
cccgactcagtcaaggggagatttaccatttcacgagacaacgctaagaataccctgtatttgcagatgaattctctgaga
gcagaggacacagctgtttactattgtacccgcgacaactatggcaggaactacgactacggtatggactattggggacaa
gggacattggttacagtgagcagtggcggcgggggcagcggaggaggaggcagcggtggcggaggcagcgagatagtgctc
acgcagtcacccgcgactctcagtctctcacctggggaacgagctaccctgacgtgctctgctacctcctcagtgtcatat
attcactggtatcagcaacggcccgggcagtcccctagattgctcatttatagtacctctaatctggcctcaggtatccct
gcacgattttctggatctggttcaggttctgattacaccctcactatctctagcctggagcctgaagactttgccgtttat
tactgccagcagaggtctagctccccattcacctttgggagtgggaccaaggttgaaattaaagacaagacgcacaccaag
ccacctaaaccagctccagaactgctcggaggtcctggcaccggaaccggaggacctaccatcaaaccacctaagccacct
aagcctgctcctaacctgctcggaggacctatggccctgattgtgctggggggcgtcgccggcctcctgcttttcattggg
ctaggcatcttcttcaaaaggggccgcaaaaaactcctttacatttttaagcagccttttatgaggccagtacagacgact
caagaggaagacgggtgctcatgccgctttcctgaggaggaggaaggagggtgcgaactgcgcgttaagttctcccgatca
gccgacgcgcctgcttacaagcagggccagaaccaactgtacaacgagctgaatctcggtagacgggaagagtacgacgtg
ttggacaaacggagaggccgcgacccagaaatgggcggcaagcctcgcaggaaaaacccccaggagggactgtacaatgag
ttgcagaaagataagatggcagaagcttatagcgagatcggaatgaagggggaaaggagacgagggaaaggacacgacggc
ctttatcagggcctgtccacagcaacaaaagatacgtatgacgccctccatatgcaggcacttccaccacggtgataa
(amino acids)
(SEQ ID NO: 334)
MALPVTALLLPLALLLHAARPEVQLVESGGGLVKPGGSLRLSCAASGFTFSRYGMSWVRQAPGKRLEWVSTISGGGTYIY
YPDSVKGRFTISRDNAKNTLYLQMNSLRAEDTAVYYCTRDNYGRNYDYGMDYWGQGTLVTVSSGGGGSGGGGSGGGGSEI
VLTQSPATLSLSPGERATLTCSATSSVSYIHWYQQRPGQSPRLLIYSTSNLASGIPARFSGSGSGSDYTLTISSLEPEDF
AVYYCQQRSSSPFTFGSGTKVEIKDKTHTKPPKPAPELLGGPGTGTGGPTIKPPKPPKPAPNLLGGPMALIVLGGVAGLL
LFIGLGIFFKRGRKKLLYIFKQPFMRPVQTTQEEDGCSCRFPEEEEGGCELRVKFSRSADAPAYKQGQNQLYNELNLGRR
EEYDVLDKRRGRDPEMGGKPRRKNPQEGLYNELQKDKMAEAYSEIGMKGERRRGKGHDGLYQGLSTATKDTYDALHMQAL
PPR**
E6 CAR X44 pCDH gBLOCK sequence:
(DNA)
(SEQ ID NO: 335)
agtacctctaatctggcctcaggtatccctgcacgattttctggatctggttcaggttctgattacaccctcactatctct
agcctggagcctgaagactttgccgtttattactgccagcagaggtctagctccccattcacctttgggagtgggaccaag
gttgaaattaaagacaagacgcacaccaagccacctaaaccagctccagaactgctcggaggtcctggcaccggaaccgga
ggacctaccatcaaaccacctaagccacctaagcctgctcctaacctgctcggaggacctatggccctgattgtgctgggg
ggcgtcgccggcctcctgcttttcattgggctaggcatcttcttcaaaaggggccgcaaaaaactcctttacatttttaag
cagccttttatgaggccag
CAR E6 8 + 4/4/4-1BB/CD3z sequence:
N-CD8ls-huMNE6scFv- CD8ecd + CD4ecd fragment - CD4 transmembrane- 4-1BB-
CD3zeta-C
(DNA)
(SEQ ID NO: 336)
atggccctgcccgtgaccgctttgctgctccccctggcgctgctgctgcacgccgccaggccagaggtccagctggttgag
agtggcggtgggctggttaagcctggcggctccctgcggctgagctgcgccgcgagtggatttactttcagccgatatggg
atgagttgggtgcggcaagctcccgggaagaggctggaatgggtctcaacaatctccggggggggcacttacatctattac
cccgactcagtcaaggggagatttaccatttcacgagacaacgctaagaataccctgtatttgcagatgaattctctgaga
gcagaggacacagctgtttactattgtacccgcgacaactatggcaggaactacgactacggtatggactattggggacaa
gggacattggttacagtgagcagtggcggcgggggcagcggaggaggaggcagcggtggcggaggcagcgagatagtgctc
acgcagtcacccgcgactctcagtctctcacctggggaacgagctaccctgacgtgctctgctacctcctcagtgtcatat
attcactggtatcagcaacggcccgggcagtcccctagattgctcatttatagtacctctaatctggcctcaggtatccct
gcacgattttctggatctggttcaggttctgattacaccctcactatctctagcctggagcctgaagactttgccgtttat
tactgccagcagaggtctagctccccattcacctttgggagtgggaccaaggttgaaattaaaacgacaaccccggccccc
agaccaccaacgccagcccccaccatcgccagccaacccctgtctctgagaccagaagcctgtaggcctgccgccggtgga
gctgtgcacacaagaggactggatttcgcctgtgatatggccctgattgtgctggggggcgtcgccggcctcctgcttttc
attgggctaggcatcttcttcaaaaggggccgcaaaaaactcctttacatttttaagcagccttttatgaggccagtacag
acgactcaagaggaagacgggtgctcatgccgctttcctgaggaggaggaaggagggtgcgaactgcgcgttaagttctcc
cgatcagccgacgcgcctgcttacaagcagggccagaaccaactgtacaacgagctgaatctcggtagacgggaagagtac
gacgtgttggacaaacggagaggccgcgacccagaaatgggcggcaagcctcgcaggaaaaacccccaggagggactgtac
aatgagttgcagaaagataagatggcagaagcttatagcgagatcggaatgaagggggaaaggagacgagggaaaggacac
gacggcctttatcagggcctgtccacagcaacaaaagatacgtatgacgccctccatatgcaggcacttccaccacggtga
taa
(amino acids)
(SEQ ID NO: 337)
MALPVTALLLPLALLLHAARPEVQLVESGGGLVKPGGSLRLSCAASGFTFSRYGMSWVRQAPGKRLEWVSTISGGGTYIY
YPDSVKGRFTISRDNAKNTLYLQMNSLRAEDTAVYYCTRDNYGRNYDYGMDYWGQGTLVTVSSGGGGSGGGGSGGGGSEI
VLTQSPATLSLSPGERATLTCSATSSVSYIHWYQQRPGQSPRLLIYSTSNLASGIPARFSGSGSGSDYTLTISSLEPEDF
AVYYCQQRSSSPFTFGSGTKVEIKTTTPAPRPPTPAPTIASQPLSLRPEACRPAAGGAVHTRGLDFACDMALIVLGGVAG
LLLFIGLGIFFKRGRKKLLYIFKQPFMRPVQTTQEEDGCSCRFPEEEEGGCELRVKFSRSADAPAYKQGQNQLYNELNLG
RREEYDVLDKRRGRDPEMGGKPRRKNPQEGLYNELQKDKMAEAYSEIGMKGERRRGKGHDGLYQGLSTATKDTYDALHMQ
ALPPR**
E6 CAR CD844 pCDH gBLOCK sequence:
(DNA)
(SEQ ID NO: 338)
agtacctctaatctggcctcaggtatccctgcacgattttctggatctggttcaggttctgattacaccctcactatctct
agcctggagcctgaagactttgccgtttattactgccagcagaggtctagctccccattcacctttgggagtgggaccaag
gttgaaattaaaacgacaaccccggcccccagaccaccaacgccagcccccaccatcgccagccaacccctgtctctgaga
ccagaagcctgtaggcctgccgccggtggagctgtgcacacaagaggactggatttcgcctgtgatatggccctgattgtg
ctggggggcgtcgccggcctcctgcttttcattgggctaggcatcttcttcaaaaggggccgcaaaaaactcctttacatt
tttaagcagccttttatgaggccag
Humanized C2 scFV sequence in CAR:
(DNA)
(SEQ ID NO: 339)
gagggccaccatggccttgccagtgacggccctgctgctgccattggctcttctgttgcacgctgccaggcctgaagtgca
gctcgtagagagtggcgggggactggtgaagcccggtggaagcctcagactcagttgcgccgcctcaggtttcactttttc
aggttacgccatgtcctgggtaagacaggcaccggggaaaggactcgagtgggtgtctactatcagctcaggaggcactta
tatatattatcctgactctgtaaaaggccgatttacgatttctcgcgacaatgcaaagaactccctctacctccaaatgaa
cagtcttagggcagaagacactgctgtatactattgtgcacgcctcggcggcgacaactactacgagtactttgacgtgtg
ggggaaagggactaccgtgacagtttcaagcggaggaggtggctcaggtggaggcgggtcaggggggggaggaagtgatat
tgtgctcacacaatccccagcctccctggctgtgtctcccggccaacgcgctacaattacatgtcgggcctccaaaagcgt
gagcaccagcggctacagctacatgcactggtatcaacagaaaccaggacaaccccccaaactgttgatttatctcgcttc
aaacttggagtccggcgtgcctgcgcgcttttcagggagtgggagcggcacagattttacgctgactatcaaccccgtaga
agcaaacgatacagcgaattattattgtcaacattcccgggaactcccctttacgttcggcgggggcacaaaggtcgaaat
taagagaacc
(amino acids)
(SEQ ID NO: 340)
EVQLVESGGGLVKPGGSLRLSCAASGFTFSGYAMSWVRQAPGKGLEWVSTISSGGTYIYYPDSVKGRFTISRDNAKNSLY
LQMNSLRAEDTAVYYCARLGGDNYYEYFDVWGKGTTVTVSSGGGGSGGGGSGGGGSDIVLTQSPASLAVSPGQRATITCR
ASKSVSTSGYSYMHWYQQKPGQPPKLLIYLASNLESGVPARFSGSGSGTDFTLTINPVEANDTANYYCQHSRELPFTFGG
GTKVEIKRT
Humanized E6 scFV sequence in CAR:
(DNA)
(SEQ ID NO: 341)
gaggtccagctggttgagagtggcggtgggctggttaagcctggcggctccctgcggctgagctgcgccgcgagtggattt
actttcagccgatatgggatgagttgggtgcggcaagctcccgggaagaggctggaatgggtctcaacaatctccgggggg
ggcacttacatctattaccccgactcagtcaaggggagatttaccatttcacgagacaacgctaagaataccctgtatttg
cagatgaattctctgagagcagaggacacagctgtttactattgtacccgcgacaactatggcaggaactacgactacggt
atggactattggggacaagggacattggttacagtgagcagtggcggcgggggcagcggaggaggaggcagcggtgggggg
ggcagcgagatagtgctcacgcagtcacccgcgactctcagtctctcacctggggaacgagctaccctgacgtgctctgct
acctcctcagtgtcatatattcactggtatcagcaacggcccgggcagtcccctagattgctcatttatagtacctctaat
ctggcctcaggtatccctgcacgattttctggatctggttcaggttctgattacaccctcactatctctagcctggagcct
gaagactttgccgtttattactgccagcagaggtctagctccccattcacctttgggagtgggaccaaggttgaaattaaa
(amino acids)
(SEQ ID NO: 342)
EVQLVESGGGLVKPGGSLRLSCAASGFTFSRYGMSWVRQAPGKRLEWVSTISGGGTYIYYPDSVKGRFTISRDNAKNTLY
LQMNSLRAEDTAVYYCTRDNYGRNYDYGMDYWGQGTLVTVSSGGGGSGGGGSGGGGSEIVLTQSPATLSLSPGERATLTC
SATSSVSYIHWYQQRPGQSPRLLIYSTSNLASGIPARFSGSGSGSDYTLTISSLEPEDFAVYYCQQRSSSPFTFGSGTKV
EIK
CD8 leader sequence:
(DNA)
(SEQ ID NO: 343)
atggccctgcccgtgaccgctttgctgctccccctggcgctgctgctgcacgccgccaggcca
(amino acids)
(SEQ ID NO: 344)
MALPVTALLLPLALLLHAARP
CD8 hinge domain sequence:
(DNA)
(SEQ ID NO: 345)
acgacaaccccggcccccagaccaccaacgccagcccccaccatcgccagccaacccctgtctctgagaccagaagcctgt
aggcctgccgccggtggagctgtgcacacaagaggactggatttcgcctgtgat
(amino acids)
(SEQ ID NO: 346)
TTTPAPRPPTPAPTIASQPLSLRPEACRPAAGGAVHTRGLDFACD
CD4 hinge domain sequence:
(DNA)
(SEQ ID NO: 347)
tcgggacaggtcctgctggaatccaacatcaaggttctgcccacatggtccaccccggtgcagcca
(amino acids)
(SEQ ID NO: 348)
SGQVLLESNIKVLPTWSTPVQP
CD28 hinge domain sequence:
(DNA)
(SEQ ID NO: 349)
aaacacctttgtccaagtcccctatttcccggaccttctaagccc
(amino acids)
(SEQ ID NO: 350)
KHLCPSPLFPGPSKP
CD8 + CD4 hinge domain sequence:
(DNA)
(SEQ ID NO: 351)
acgacaaccccggcccccagaccaccaacgccagcccccaccatcgccagccaacccctgtctctgagaccagaagcctgt
aggcctgccgccggtggagctgtgcacacaagaggactggatttcgcctgtgattcgggacaggtcctgctggaatccaac
atcaaggttctgcccacatggtccaccccggtgcagcca
(amino acids)
(SEQ ID NO: 352)
TTTPAPRPPTPAPTIASQPLSLRPEACRPAAGGAVHTRGLDFACDSGQVLLESNIKVLPTWSTPVQP
CD8 + CD28 hinge domain sequence:
(DNA)
(SEQ ID NO: 353)
acgacaaccccggcccccagaccaccaacgccagcccccaccatcgccagccaacccctgtctctgagaccagaagcctgt
aggcctgccgccggtggagctgtgcacacaagaggactggatttcgcctgtgataaacacctttgtccaagtcccctatt
tcccggaccttctaagccc
(amino acids)
(SEQ ID NO: 354)
TTTPAPRPPTPAPTIASQPLSLRPEACRPAAGGAVHTRGLDFACDKHLCPSPLFPGPSKP
CD28 + CD4 hinge domain sequence:
(DNA)
(SEQ ID NO: 355)
aaacacctttgtccaagtcccctatttcccggaccttctaagccctcgggacaggtcctgctggaatccaacatcaaggt
tctgcccacatggtccaccccggtgcagcca
(amino acids)
(SEQ ID NO: 356)
KHLCPSPLFPGPSKPSGQVLLESNIKVLPTWSTPVQP
Human IgD hinge domain sequence:
(DNA)
(SEQ ID NO: 357)
gagtctccaaaggcacaggcctcctcagtgcccactgcacaaccccaagcagagggcagcctcgccaaggcaaccacagc
cccagccaccacccgtaacacaggaagaggcggcgaagagaagaaaaaggagaaggagaaagaggaacaagaagagagag
agacaaagacacca
(amino acids)
(SEQ ID NO: 358)
ESPKAQASSVPTAQPQAEGSLAKATTAPATTRNTGRGGEEKKKEKEKEEQEERETKTP
X4 linker (IgG1 and IgG2 modified hinge region) sequence:
(DNA)
(SEQ ID NO: 359)
gacaagacgcacaccaagccacctaaaccagctccagaactgctcggaggtcctggcaccggaaccggaggacctaccatc
aaaccacctaagccacctaagcctgctcctaacctgctcggaggacct
(amino acids)
(SEQ ID NO: 360)
DKTHTKPPKPAPELLGGPGTGTGGPTIKPPKPPKPAPNLLGGP
CD3 zeta transmembrane domain sequence:
(DNA)
(SEQ ID NO: 361)
ctctgctacctgctggatggaatcctcttcatctatggtgtcattctcactgccttgttcctg
(amino acids)
(SEQ ID NO: 362)
LCYLLDGILFIYGVILTALFL
CD8 transmembrane domain sequence:
(DNA)
(SEQ ID NO: 363)
atctacatttgggccccgctcgcaggcacatgtggagtgctcctcctctccctggtgattaccctgtactgc
(amino acids)
(SEQ ID NO: 364)
IYIWAPLAGTCGVLLLSLVITLYC
CD4 transmembrane domain sequence:
(DNA)
(SEQ ID NO: 365)
atggccctgattgtgctggggggcgtcgccggcctcctgcttttcattgggctaggcatcttcttc
(amino acids)
(SEQ ID NO: 366)
MALIVLGGVAGLLLFIGLGIFF
CD28 transmembrane domain sequence:
(DNA)
(SEQ ID NO: 367)
ttttgggtgctggtggtggttggtggagtcctggcttgctatagcttgctagtaacagtggcctttattattttctgggt
g
(amino acids)
(SEQ ID NO: 368)
FWVLVVVGGVLACYSLLVTVAFIIFWV
4-1BB transmembrane domain sequence:
(DNA)
(SEQ ID NO: 369)
atcatctccttctttcttgcgctgacgtcgactgcgttgctcttcctgctgttcttcctcacgctccgtttctctgttgt
t
(amino acids)
(SEQ ID NO: 370)
IISFFLALTSTALLFLLFFLTLRFSVV
OX40 transmembrane domain sequence:
(DNA)
(SEQ ID NO: 371)
gttgccgccatcctgggcctgggcctggtgctggggctgctgggccccctggccatcctgctggccctgtacctgctc
(amino acids)
(SEQ ID NO: 372)
VAAILGLGLVLGLLGPLAILLALYLL
CD3 zeta domain sequence:
(DNA)
(SEQ ID NO: 373)
cgcgttaagttctcccgatcagccgacgcgcctgcttacaagcagggccagaaccaactgtacaacgagctgaatctcggt
agacgggaagagtacgacgtgttggacaaacggagaggccgcgacccagaaatgggcggcaagcctcgcaggaaaaacccc
caggagggactgtacaatgagttgcagaaagataagatggcagaagcttatagcgagatcggaatgaagggggaaaggaga
cgagggaaaggacacgacggcctttatcagggcctgtccacagcaacaaaagatacgtatgacgccctccatatgcaggca
cttccaccacgg
(amino acids)
(SEQ ID NO: 374)
RVKFSRSADAPAYKQGQNQLYNELNLGRREEYDVLDKRRGRDPEMGGKPRRKNPQEGLYNELQKDKMAEAYSEIGMKGERR
RGKGHDGLYQGLSTATKDTYDALHMQALPPR
CD3 zeta domain variant sequence:
(DNA)
(SEQ ID NO: 375)
agagtgaagttcagcaggagcgcagacgcccccgcgtaccagcagggccagaaccagctctataacgagctcaatctagg
acgaagagaggagtacgatgttttggacaagagacgtggccgggaccctgagatggggggaaagccgagaaggaagaacc
ctcaggaaggcctgtacaatgaactgcagaaagataagatggcggaggcctacagtgagattgggatgaaaggcgagcgc
cggaggggcaaggggcacgatggcctttaccagggtctcagtacagccaccaaggacacctacgacgcccttcacatgca
ggccctgccccctcgc
(amino acids)
(SEQ ID NO: 376)
RVKFSRSADAPAYQQGQNQLYNELNLGRREEYDVLDKRRGRDPEMGGKPRRKNPQEGLYNELQKDKMAEAYSEIGMKGER
RRGKGHDGLYQGLSTATKDTYDALHMQALPPR
CD28 domain sequence:
(DNA)
(SEQ ID NO: 377)
agaagcaagcggtctcggctcctgcattctgattacatgaacatgaccccaagaagaccaggccccaccaggaaacattac
cagccctacgctccgccacgcgacttcgctgcctaccggtcc
(amino acids)
(SEQ ID NO: 378)
RSKRSRLLHSDYMNMTPRRPGPTRKHYQPYAPPRDFAAYRS
4-1BB domain sequence:
(DNA)
(SEQ ID NO: 379)
aaaaggggccgcaaaaaactcctttacatttttaagcagccttttatgaggccagtacagacgactcaagaggaagacggg
tgctcatgccgctttcctgaggaggaggaaggagggtgcgaactg
(amino acids)
(SEQ ID NO: 380)
KRGRKKLLYIFKQPFMRPVQTTQEEDGCSCRFPEEEEGGCEL
OX40 domain sequence:
(DNA)
(SEQ ID NO: 381)
cggagggaccagaggctgccccccgatgcccacaagccccctgggggaggcagtttccggacccccatccaagaggagcag
gccgacgcccactccaccctggccaagatc
(amino acids)
(SEQ ID NO: 382)
RRDQRLPPDAHKPPGGGSFRTPIQEEQADAHSTLAKI
Humanized anti CD3 scFV clone 12F6 (VH-VL) sequence:
(DNA)
(SEQ ID NO: 383)
caggtgcagctggtgcagagcggaggtggagtggtccaacctggaagatctctgagactgagctgtaaggctagcgggta
cacgttcacatcttacacgatgcactgggtgaggcaagcccccggtaagggcctggaatggatcggatatataaacccca
gctcagggtataccaaatataatcagaagttcaaagatcggttcacgatttctgctgataaaagtaagtccaccgctttc
ctgcagatggactcactcaggccagaagatactggtgtttatttctgtgcaaggtggcaggactacgacgtgtactttga
ctattgggggcaggggacgcctgtaacagtatcaagcggcggtggcggatccggcggtggcggatccggcggtggcggat
ccgatattcagatgacccagagcccgagcagcctgagcgcgagcgtgggcgatcgcgtgaccatgacctgccgcgcgagc
agcagcgtgagctatatgcattggtatcagcagaccccgggcaaagcgccgaaaccgtggatttatgcgaccagcaacct
ggcgagcggcgtgccgagccgctttagcggcagcggcagcggcaccgattataccctgaccattagcagcctgcagccgg
aagatattgcgacctattattgccagcagtggagcagcaacccgccgacctttggccagggcaccaaactgcagattacc
cgc
(amino acids)
(SEQ ID NO: 384)
QVQLVQSGGGVVQPGRSLRLSCKASGYTFTSYTMHWVRQAPGKGLEWIGYINPSSGYTKYNQKFKDRFTISADKSKSTAF
LQMDSLRPEDTGVYFCARWQDYDVYFDYWGQGTPVTVSSGGGGSGGGGSGGGGSDIQMTQSPSSLSASVGDRVTMTCRAS
SSVSYMHWYQQTPGKAPKPWIYATSNLASGVPSRFSGSGSGTDYTLTISSLQPEDIATYYCQQWSSNPPTFGQGTKLQIT
R
Humanized anti CD3 scFV clone 12F6 (VL-VH) sequence:
(DNA)
(SEQ ID NO: 385)
gatattcagatgacccagagcccgagcagcctgagcgcgagcgtgggcgatcgcgtgaccatgacctgccgcgcgagcag
cagcgtgagctatatgcattggtatcagcagaccccgggcaaagcgccgaaaccgtggatttatgcgaccagcaacctgg
cgagcggcgtgccgagccgctttagcggcagcggcagcggcaccgattataccctgaccattagcagcctgcagccggaa
gatattgcgacctattattgccagcagtggagcagcaacccgccgacctttggccagggcaccaaactgcagattacccg
cggcggtggcggatccggcggtggcggatccggcggtggcggatcccaggtgcagctggtgcagagcggaggtggagtgg
tccaacctggaagatctctgagactgagctgtaaggctagcgggtacacgttcacatcttacacgatgcactgggtgagg
caagcccccggtaagggcctggaatggatcggatatataaaccccagctcagggtataccaaatataatcagaagttcaa
agatcggttcacgatttctgctgataaaagtaagtccaccgctttcctgcagatggactcactcaggccagaagatactg
gtgtttatttctgtgcaaggtggcaggactacgacgtgtactttgactattgggggcaggggacgcctgtaacagtatca
agc
(amino acids)
(SEQ ID NO: 386)
DIQMTQSPSSLSASVGDRVTMTCRASSSVSYMHWYQQTPGKAPKPWIYATSNLASGVPSRFSGSGSGTDYTLTISSLQPE
DIATYYCQQWSSNPPTFGQGTKLQITRGGGGSGGGGSGGGGSQVQLVQSGGGVVQPGRSLRLSCKASGYTFTSYTMHWVR
QAPGKGLEWIGYINPSSGYTKYNQKFKDRFTISADKSKSTAFLQMDSLRPEDTGVYFCARWQDYDVYFDYWGQGTPVTVS
S
Humanized anti CD3 scFV clone OKT3 (VH-VL) sequence:
(DNA)
(SEQ ID NO: 387)
caggtgcagctggtgcagagcggaggcggagtggtgcagcctggaagaagcctgcgcctgagctgcaaagcgagcggcta
tacctttacccgctataccatgcattgggtgcgccaggcgccgggcaaaggcctggaatggattggctatattaacccga
gccgcggctataccaactataaccagaaagtgaaagatcgctttaccattagcaccgataaaagcaaaagcaccgcgttt
ctgcagatggatagcctgcgcccggaagataccgcggtgtattattgcgcgcgctattatgatgatcattattgcctgga
ttattggggccagggcaccaccctgaccgtgagcagcggcggtggcggatccggcggtggcggatccggcggtggcggat
ccgatattcagatgacccagagcccgagcagcctgagcgcgagcgtgggcgatcgcgtgaccattacctgcagcgcgagc
agcagcgtgagctatatgaactggtatcagcagaccccgggcaaagcgccgaaacgctggatttatgataccagcaaact
ggcgagcggcgtgccgagccgctttagcggcagcggcagcggcaccgattatacctttaccattagcagcctgcagccgg
aagatattgcgacctattattgccagcagtggagcagcaacccgtttacctttggccagggcaccaaactgcagattacc
cgc
(amino acids)
(SEQ ID NO: 388)
QVQLVQSGGGVVQPGRSLRLSCKASGYTFTRYTMHWVRQAPGKGLEWIGYINPSRGYTNYNQKVKDRFTISTDKSKSTAF
LQMDSLRPEDTAVYYCARYYDDHYCLDYWGQGTTLTVSSGGGGSGGGGSGGGGSDIQMTQSPSSLSASVGDRVTITCSAS
SSVSYMNWYQQTPGKAPKRWIYDTSKLASGVPSRFSGSGSGTDYTFTISSLQPEDIATYYCQQWSSNPFTFGQGTKLQIT
R
Humanized anti CD3 scFV clone OKT3 (VH-VL) sequence:
(DNA)
(SEQ ID NO: 389)
gatattcagatgacccagagcccgagcagcctgagcgcgagcgtgggcgatcgcgtgaccattacctgcagcgcgagcag
cagcgtgagctatatgaactggtatcagcagaccccgggcaaagcgccgaaacgctggatttatgataccagcaaactgg
cgagcggcgtgccgagccgctttagcggcagcggcagcggcaccgattatacctttaccattagcagcctgcagccggaa
gatattgcgacctattattgccagcagtggagcagcaacccgtttacctttggccagggcaccaaactgcagattacccg
cggcggtggcggatccggcggtggcggatccggcggtggcggatcccaggtgcagctggtgcagagcggaggcggagtgg
tgcagcctggaagaagcctgcgcctgagctgcaaagcgagcggctatacctttacccgctataccatgcattgggtgcgc
caggcgccgggcaaaggcctggaatggattggctatattaacccgagccgcggctataccaactataaccagaaagtgaa
agatcgctttaccattagcaccgataaaagcaaaagcaccgcgtttctgcagatggatagcctgcgcccggaagataccg
cggtgtattattgcgcgcgctattatgatgatcattattgcctggattattggggccagggcaccaccctgaccgtgagc
agc
(amino acids)
(SEQ ID NO: 390)
DIQMTQSPSSLSASVGDRVTITCSASSSVSYMNWYQQTPGKAPKRWIYDTSKLASGVPSRFSGSGSGTDYTFTISSLQPE
DIATYYCQQWSSNPFTFGQGTKLQITRGGGGSGGGGSGGGGSQVQLVQSGGGVVQPGRSLRLSCKASGYTFTRYTMHWVR
QAPGKGLEWIGYINPSRGYTNYNQKVKDRFTISTDKSKSTAFLQMDSLRPEDTAVYYCARYYDDHYCLDYWGQGTTLTVS
S
HumanizeE6 scFV (VH-VL) sequence:
(DNA)
(SEQ ID NO: 391)
gaggtgcagctggtggagtctgggggaggcctggtcaagcctggggggtccctgagactctcctgtgcagcctctggattc
accttcagtaggtatggcatgagctgggtccgccaggctccagggaagaggctggagtgggtctcaaccattagtggcgga
ggcacctacatatactacccagactcagtgaagggccgattcaccatctccagagacaacgccaagaacaccctgtatctg
caaatgaacagcctgagagccgaggacacggctgtgtattactgtaccagagataactatggccgcaactatgattatggc
atggattattggggccagggcaccctggtgaccgtgagcagcggcggtggcggatccggcggtggcggatccggcggtggc
ggatccgaaattgtgttgacacagtctccagccaccctgtctttgtctccaggggaaagagccaccctcacctgcagcgcc
accagcagtgttagctacatccactggtaccaacagaggcctggccagagccccaggctcctcatctatagcacctccaac
ctggccagcggcatcccagccaggttcagtggcagtgggtctgggagcgactacactctcaccatcagcagcctagagcct
gaagattttgcagtttattactgtcagcagcgtagcagctcccctttcacctttggcagcggcaccaaagtggaaattaaa
(amino acids)
(SEQ ID NO: 392)
EVQLVESGGGLVKPGGSLRLSCAASGFTFSRYGMSWVRQAPGKRLEWVSTISGGGTYIYYPDSVKGRFTISRDNAKNTLY
LQMNSLRAEDTAVYYCTRDNYGRNYDYGMDYWGQGTLVTVSSGGGGSGGGGSGGGGSEIVLTQSPATLSLSPGERATLTC
SATSSVSYIHWYQQRPGQSPRLLIYSTSNLASGIPARFSGSGSGSDYTLTISSLEPEDFAVYYCQQRSSSPFTFGSGTKV
EIK
HumanizeE6 scFV (VL-VH) sequence:
(DNA)
(SEQ ID NO: 393)
gaaattgtgttgacacagtctccagccaccctgtctttgtctccaggggaaagagccaccctcacctgcagcgccaccagc
agtgttagctacatccactggtaccaacagaggcctggccagagccccaggctcctcatctatagcacctccaacctggcc
agcggcatcccagccaggttcagtggcagtgggtctgggagcgactacactctcaccatcagcagcctagagcctgaagat
tttgcagtttattactgtcagcagcgtagcagctcccctttcacctttggcagcggcaccaaagtggaaattaaaggcggt
ggcggatccggcggtggcggatccggcggtggcggatccgaggtgcagctggtggagtctgggggaggcctggtcaagcct
ggggggtccctgagactctcctgtgcagcctctggattcaccttcagtaggtatggcatgagctgggtccgccaggctcca
gggaagaggctggagtgggtctcaaccattagtggcggaggcacctacatatactacccagactcagtgaagggccgattc
accatctccagagacaacgccaagaacaccctgtatctgcaaatgaacagcctgagagccgaggacacggctgtgtattac
tgtaccagagataactatggccgcaactatgattatggcatggattattggggccagggcaccctggtgaccgtgagcagc
(amino acids)
(SEQ ID NO: 394)
EIVLTQSPATLSLSPGERATLTCSATSSVSYIHWYQQRPGQSPRLLIYSTSNLASGIPARFSGSGSGSDYTLTISSLEPE
DFAVYYCQQRSSSPFTFGSGTKVEIKGGGGSGGGGSGGGGSEVQLVESGGGLVKPGGSLRLSCAASGFTFSRYGMSWVRQ
APGKRLEWVSTISGGGTYIYYPDSVKGRFTISRDNAKNTLYLQMNSLRAEDTAVYYCTRDNYGRNYDYGMDYWGQGTLVT
VSS
HumanizeC2 scFV (VH-VL) sequence:
(DNA)
(SEQ ID NO: 395)
gaggtgcagctggtggagtctgggggaggcctggtcaagcctggggggtccctgagactctcctgtgcagcctctggattc
accttcagtggctatgccatgagctgggtccgccaggctccagggaaggggctggagtgggtctcaaccattagtagtggc
ggaacctacatatactaccccgactcagtgaagggccgattcaccatctccagagacaacgccaagaactcactgtatctg
caaatgaacagcctgagagccgaggacacggccgtgtattactgtgcgagacttgggggggataattactacgaatacttc
gatgtctggggcaaagggaccacggtcaccgtctcctccggcggtggcggatccggcggtggcggatccggcggtggcgga
tccgacattgtgctgacccagtctccagcctccttggccgtgtctccaggacagagggccaccatcacctgcagagccagt
aagagtgtcagtaccagcggatactcctacatgcactggtatcagcagaaaccaggacaacctcctaaactcctgatttac
ctggcatccaatctggagagcggggtcccagccaggttcagcggcagtgggtctgggaccgatttcaccctcacaattaat
cctgtggaagctaatgatactgcaaattattactgtcagcacagtagggagctgcctttcacattcggcggagggaccaag
gtggagatcaaacgaact
(amino acids)
(SEQ ID NO: 396)
EVQLVESGGGLVKPGGSLRLSCAASGFTFSGYAMSWVRQAPGKGLEWVSTISSGGTYIYYPDSVKGRFTISRDNAKNSLY
LQMNSLRAEDTAVYYCARLGGDNYYEYFDVWGKGTTVTVSSGGGGSGGGGSGGGGSDIVLTQSPASLAVSPGQRATITCR
ASKSVSTSGYSYMHWYQQKPGQPPKLLIYLASNLESGVPARFSGSGSGTDFTLTINPVEANDTANYYCQHSRELPFTFGG
GTKVEIKRT
HumanizeE6 scFV (VL-VH) sequence:
(DNA)
(SEQ ID NO: 397)
gacattgtgctgacccagtctccagcctccttggccgtgtctccaggacagagggccaccatcacctgcagagccagtaag
agtgtcagtaccagcggatactcctacatgcactggtatcagcagaaaccaggacaacctcctaaactcctgatttacctg
gcatccaatctggagagcggggtcccagccaggttcagcggcagtgggtctgggaccgatttcaccctcacaattaatcct
gtggaagctaatgatactgcaaattattactgtcagcacagtagggagctgcctttcacattcggcggagggaccaaggtg
gagatcaaacgaactggcggtggcggatccggcggtggcggatccggcggtggcggatccgaggtgcagctggtggagtct
gggggaggcctggtcaagcctggggggtccctgagactctcctgtgcagcctctggattcaccttcagtggctatgccatg
agctgggtccgccaggctccagggaaggggctggagtgggtctcaaccattagtagtggcggaacctacatatactacccc
gactcagtgaagggccgattcaccatctccagagacaacgccaagaactcactgtatctgcaaatgaacagcctgagagcc
gaggacacggccgtgtattactgtgcgagacttgggggggataattactacgaatacttcgatgtctggggcaaagggacc
acggtcaccgtctcctcc
(amino acids)
(SEQ ID NO: 398)
DIVLTQSPASLAVSPGQRATITCRASKSVSTSGYSYMHWYQQKPGQPPKLLIYLASNLESGVPARFSGSGSGTDFTLTIN
PVEANDTANYYCQHSRELPFTFGGGTKVEIKRTGGGGSGGGGSGGGGSEVQLVESGGGLVKPGGSLRLSCAASGFTFSGY
AMSWVRQAPGKGLEWVSTISSGGTYIYYPDSVKGRFTISRDNAKNSLYLQMNSLRAEDTAVYYCARLGGDNYYEYFDVWG
KGTTVTVSS
G₄S₁ linker sequence:
(DNA)
(SEQ ID NO: 399)
ggcggtggcggatcc
(amino acids)
(SEQ ID NO: 400)
GGGGS
[G₄S₁]x3 linker sequence:
(DNA)
(SEQ ID NO: 401)
ggcggtggcggatccggcggtggcggatccggcggtggcggatcc
(amino acids)
(SEQ ID NO: 402)
GGGGSGGGGSGGGGS
8 aa GS linker sequence:
(DNA)
(SEQ ID NO: 403)
ggcggttccggcggtggatccgga
(amino acids)
(SEQ ID NO: 404)
GGSGGGSG
12 aa GS linker sequence:
(DNA)
(SEQ ID NO: 405)
ggcggttccggcggtggatccggcggtggcggatccgga
(amino acids)
(SEQ ID NO: 406)
GGSGGGSGGGSG
13 aa GS linker sequence:
(DNA)
(SEQ ID NO: 407)
ggcggtggatccggcggtggcggatccggcggtggatcc
(amino acids)
(SEQ ID NO: 408)
GGGSGGGGSGGGS
22 aa GS linker sequence:
(DNA)
(SEQ ID NO: 409)
ggcggtggaagcggcggtggcggatccggcagcggcggaagcggcggtggcggatccggcggtgga
(amino acids)
(SEQ ID NO: 4110)
GGGSGGGGSGSGGSGGGGSGGG
24 aa GS linker sequence:
(DNA)
(SEQ ID NO: 411)
ggcggttccggcggtggatccggcggtggcggatccggaggcggttccggcggtggatccggcggtggcggatccgga
(amino acids)
(SEQ ID NO: 412)
GGSGGGSGGGSGGGSGGGSGGGSG
Mouse C3 Heavy chain variable region sequence:
(DNA)
(SEQ ID NO: 413)
caggtccagctgcagcagtctgggcctgagctggtgaggcctggggtctcagtgaagatttcctgcaagggttccggctac
agattcactgattatgctatgaactgggtgaagcagagtcatgcaaagagtctagagtggattggagttattagtactttc
tctggtaatacaaacttcaaccagaagtttaagggcaaggccacaatgactgtagacaaatcctccagcacagcctatatg
gaacttgccagattgacatctgaggattctgccatgtattactgtgcaagatcggattactacggcccatactttgactac
tggggccaaggcaccactctcacagtctcctca
(amino acids)
(SEQ ID NO: 414)
QVQLQQSGPELVRPGVSVKISCKGSGYRFTDYAMNWVKQSHAKSLEWIGVISTFSGNTNFNQKFKGKATMTVDKSSSTAYM
ELARLTSEDSAMYYCARSDYYGPYFDYWGQGTTLTVSS
Mouse C3 heavy chain variable framework region 1 (FWR1) sequence:
(DNA)
(SEQ ID NO: 415)
caggtccagctgcagcagtctgggcctgagctggtgaggcctggggtctcagtgaagatttcctgcaagggttccggcta
cagattcact
(amino acids)
(SEQ ID NO: 416)
QVQLQQSGPELVRPGVSVKISCKGSGYRFT
Mouse C3 heavy chain variable complementarity determining regions 1 (CDR1)
sequence:
(DNA)
(SEQ ID NO: 417)
gattatgctatgaac
(amino acids)
(SEQ ID NO: 418)
DYAMN
Mouse C3 heavy chain variable framework region 2 (FWR2) sequence:
(DNA)
(SEQ ID NO: 419)
tgggtgaagcagagtcatgcaaagagtctagagtggattgga
(amino acids)
(SEQ ID NO: 420)
WVKQSHAKSLEWIG
Mouse C3 heavy chain variable complementarity determining regions 2 (CDR2)
sequence:
(DNA)
(SEQ ID NO: 421)
gttattagtactttctctggtaatacaaacttcaaccagaagtttaagggc
(amino acids)
(SEQ ID NO: 422)
VISTFSGNTNFNQKFKG
Mouse C3 heavy chain variable framework region 3 (FWR3) acid sequence:
(DNA)
(SEQ ID NO: 423)
aaggccacaatgactgtagacaaatcctccagcacagcctatatggaacttgccagattgacatctgaggattctgccat
gtattactgtgcaaga
(amino acids)
(SEQ ID NO: 424)
KATMTVDKSSSTAYMELARLTSEDSAMYYCAR
Mouse C3 heavy chain variable complementarity determining regions 3 (CDR3)
sequence:
(DNA)
(SEQ ID NO: 425)
tcggattactacggcccatactttgactac
(amino acids)
(SEQ ID NO: 426)
SDYYGPYFDY
IGHV1-18*04 heavy chain variable region sequence:
(DNA)
(SEQ ID NO: 427)
caggttcagctggtgcagtctggagctgaggtgaagaagcctggggcctcagtgaaggtctcctgcaaggcttctggttac
acctttaccagctacggtatcagctgggtgcgacaggcccctggacaagggcttgagtggatgggatggatcagcgcttac
aatggtaacacaaactatgcacagaagctccagggcagagtcaccatgaccacagacacatccacgagcacagcctacatg
gagctgaggagcctgagatctgacgacacggccgtgtattactgtgcgagaga
(amino acids)
(SEQ ID NO: 428)
QVQLVQSGAEVKKPGASVKVSCKASGYTFTSYGISWVRQAPGQGLEWMGWISAYNGNTNYAQKLQGRVTMTTDTSTSTAY
MELRSLRSDDTAVYYCAR
IGHV1-18*04 heavy chain variable framework region 1 (FWR1) sequence:
(DNA)
(SEQ ID NO: 429)
caggttcagctggtgcagtctggagctgaggtgaagaagcctggggcctcagtgaaggtctcctgcaaggcttctggtta
cacctttacc
(amino acids)
(SEQ ID NO: 430)
QVQLVQSGAEVKKPGASVKVSCKASGYTFT
IGHV1-18*04 heavy chain variable complementarity determining regions 1 (CDR1)
sequence:
(DNA)
(SEQ ID NO: 431)
agctacggtatcagc
(amino acids)
(SEQ ID NO: 432)
SYGIS
IGHV1-18*04 heavy chain variable framework region 2 (FWR2) sequence:
(DNA)
(SEQ ID NO: 433)
tgggtgcgacaggcccctggacaagggcttgagtggatggga
(amino acids)
(SEQ ID NO: 434)
WVRQAPGQGLEWMG
IGHV1-18*04 heavy chain variable complementarity determining regions 2 (CDR2)
sequence:
(DNA)
(SEQ ID NO: 435)
tggatcagcgcttacaatggtaacacaaactatgcacagaagctccagggc
(amino acids)
(SEQ ID NO: 436)
WISAYNGNTNYAQKLQG
IGHV1-18*04 heavy chain variable framework region 3 (FWR3) sequence:
(DNA)
(SEQ ID NO: 437)
agagtcaccatgaccacagacacatccacgagcacagcctacatggagctgaggagcctgagatctgacgacacggccgt
gtattactgtgcgaga
(amino acids)
(SEQ ID NO: 438)
RVTMTTDTSTSTAYMELRSLRSDDTAVYYCAR
Humanized C3 heavy chain variable region sequence:
(DNA)
(SEQ ID NO: 439)
caggttcagctggtgcagtctggagctgaggtgaagaagcctggggcctcagtgaaggtctcctgcaaggcttctggtta
cacctttaccgactacgccatgaactgggtgcgacaggcccctggacaagggcttgagtggatgggagtgatcagcacct
tcagcggtaacacaaacttcaaccagaagttcaagggcagagtcaccatgaccacagacacatccacgagcacagcctac
atggagctgaggagcctgagatctgacgacacggccgtgtattactgtgcgagaagcgactactacggcccatacttcga
ctactggggccagggcaccaccctgaccgtgtccagc
(amino acids)
(SEQ ID NO: 440)
QVQLVQSGAEVKKPGASVKVSCKASGYTFTDYAMNWVRQAPGQGLEWMGVISTFSGNTNFNQKFKGRVTMTTDTSTSTAY
MELRSLRSDDTAVYYCARSDYYGPYFDYWGQGTTLTVSS
Humanized C3 heavy chain variable framework region 1 (FWR1) acid sequence:
(DNA)
(SEQ ID NO: 441)
caggttcagctggtgcagtctggagctgaggtgaagaagcctggggcctcagtgaaggtctcctgcaaggcttctggtta
cacctttacc
(amino acids)
(SEQ ID NO: 442)
QVQLVQSGAEVKKPGASVKVSCKASGYTFT
Humanized C3 heavy chain variable complementarity determining regions 1 (CDR1)
sequence:
(DNA)
(SEQ ID NO: 443)
gactacgccatgaac
(amino acids)
(SEQ ID NO: 444)
DYAMN
Humanized C3 heavy chain variable framework region 2 (FWR2) acid sequence:
(DNA)
(SEQ ID NO: 445)
tgggtgcgacaggcccctggacaagggcttgagtggatggga
(amino acids)
(SEQ ID NO: 446)
WVRQAPGQGLEWMG
Humanized C3 heavy chain variable complementarity determining regions 2 (CDR2)
sequence:
(DNA)
(SEQ ID NO: 447)
gtgatcagcaccttcagcggtaacacaaacttcaaccagaagttcaagggc
(amino acids)
(SEQ ID NO: 448)
VISTFSGNTNFNQKFKG
Humanized C3 heavy chain variable framework region 3 (FWR3) acid sequence:
(DNA)
(SEQ ID NO: 449)
agagtcaccatgaccacagacacatccacgagcacagcctacatggagctgaggagcctgagatctgacgacacggccgtg
tattactgtgcgaga
(amino acids)
(SEQ ID NO: 450)
RVTMTTDTSTSTAYMELRSLRSDDTAVYYCAR
Humanized C3 heavy chain variable complementarity determining regions 3 (CDR3)
sequence:
(DNA)
(SEQ ID NO: 451)
agcgactactacggcccatacttcgactac
(amino acids)
(SEQ ID NO: 452)
SDYYGPYFDY
Humanized C3 IgG1 heavy chain sequence
(DNA)
(SEQ ID NO: 453)
caggttcagctggtgcagtctggagctgaggtgaagaagcctggggcctcagtgaaggtctcctgcaaggcttctggttac
acctttaccgactacgccatgaactgggtgcgacaggcccctggacaagggcttgagtggatgggagtgatcagcaccttc
agcggtaacacaaacttcaaccagaagttcaagggcagagtcaccatgaccacagacacatccacgagcacagcctacatg
gagctgaggagcctgagatctgacgacacggccgtgtattactgtgcgagaagcgactactacggcccatacttcgactac
tggggccagggcaccaccctgaccgtgtccagcgctagcaccaagggcccatcggtcttccccctggcaccctcctccaag
agcacctctgggggcacagcggccctgggctgcctggtcaaggactacttccccgaaccggtgacggtgtcgtggaactca
ggcgccctgaccagcggcgtgcacaccttcccggctgtcctacagtcctcaggactctactccctcagcagcgtggtgaca
gtgccctccagcagcttgggcacccagacctacatctgcaacgtgaatcacaagcccagcaacaccaaggtggacaagaaa
gttgagcccaaatcttgtgacaaaactcacacatgcccaccgtgcccagcacctgaactcctggggggaccgtcagtcttc
ctcttccccccaaaacccaaggacaccctcatgatctcccggacccctgaggtcacatgcgtggtggtggacgtgagccac
gaagaccctgaggtcaagttcaactggtacgtggacggcgtggaggtgcataatgccaagacaaagccgcgggaggagcag
tacaacagcacgtaccgtgtggtcagcgtcctcaccgtcctgcaccaggactggctgaatggcaaggagtacaagtgcaag
gtctccaacaaagccctcccagcccccatcgagaaaaccatctccaaagccaaagggcagccccgagaaccacaggtgtac
accctgcccccatcccgggaggagatgaccaagaaccaggtcagcctgacctgcctggtcaaaggcttctatcccagcgac
atcgccgtggagtgggagagcaatgggcagccggagaacaactacaagaccacgcctcccgtgctggactccgacggctcc
ttcttcctctacagcaagctcaccgtggacaagagcaggtggcagcaggggaacgtcttctcatgctccgtgatgcatgag
gctctgcacaaccactacacgcagaagagcctctccctgtctccgggtaaatgataa
(amino acids)
(SEQ ID NO: 454)
QVQLVQSGAEVKKPGASVKVSCKASGYTFTDYAMNWVRQAPGQGLEWMGVISTFSGNTNFNQKFKGRVTMTTDTSTSTAY
MELRSLRSDDTAVYYCARSDYYGPYFDYWGQGTTLTVSSASTKGPSVFPLAPSSKSTSGGTAALGCLVKDYFPEPVTVSW
NSGALTSGVHTFPAVLQSSGLYSLSSVVTVPSSSLGTQTYICNVNHKPSNTKVDKKVEPKSCDKTHTCPPCPAPELLGGP
SVFLFPPKPKDTLMISRTPEVTCVVVDVSHEDPEVKFNWYVDGVEVHNAKTKPREEQYNSTYRVVSVLTVLHQDWLNGKE
YKCKVSNKALPAPIEKTISKAKGQPREPQVYTLPPSREEMTKNQVSLTCLVKGFYPSDIAVEWESNGQPENNYKTTPPVL
DSDGSFFLYSKLTVDKSRWQQGNVFSCSVMHEALHNHYTQKSLSLSPGK**
Humanized C3 IgG2 heavy chain sequence
(DNA)
(SEQ ID NO: 455)
caggttcagctggtgcagtctggagctgaggtgaagaagcctggggcctcagtgaaggtctcctgcaaggcttctggttac
acctttaccgactacgccatgaactgggtgcgacaggcccctggacaagggcttgagtggatgggagtgatcagcaccttc
agcggtaacacaaacttcaaccagaagttcaagggcagagtcaccatgaccacagacacatccacgagcacagcctacatg
gagctgaggagcctgagatctgacgacacggccgtgtattactgtgcgagaagcgactactacggcccatacttcgactac
tggggccagggcaccaccctgaccgtgtccagcgcctccaccaagggcccatcggtcttccccctggcgccctgctccagg
agcacctccgagagcacagccgccctgggctgcctggtcaaggactacttccccgaaccggtgacggtgtcgtggaactca
ggcgctctgaccagcggcgtgcacaccttcccagctgtcctacagtcctcaggactctactccctcagcagcgtggtgacc
gtgccctccagcaacttcggcacccagacctacacctgcaacgtagatcacaagcccagcaacaccaaggtggacaagaca
gttgagcgcaaatgttgtgtcgagtgcccaccgtgcccagcaccacctgtggcaggaccgtcagtcttcctcttcccccca
aaacccaaggacaccctcatgatctcccggacccctgaggtcacgtgcgtggtggtggacgtgagccacgaagaccccgag
gtccagttcaactggtacgtggacggcgtggaggtgcataatgccaagacaaagccacgggaggagcagttcaacagcacg
ttccgtgtggtcagcgtcctcaccgttgtgcaccaggactggctgaacggcaaggagtacaagtgcaaggtctccaacaaa
ggcctcccagcccccatcgagaaaaccatctccaaaaccaaagggcagccccgagaaccacaggtgtacaccctgccccca
tcccgggaggagatgaccaagaaccaggtcagcctgacctgcctggtcaaaggcttctaccccagcgacatcgccgtggag
tgggagagcaatgggcagccggagaacaactacaagaccacacctcccatgctggactccgacggctccttcttcctctac
agcaagctcaccgtggacaagagcaggtggcagcaggggaacgtcttctcatgctccgtgatgcatgaggctctgcacaac
cactacacgcagaagagcctctccctgtctccgggtaaatagtaa
(amino acids)
(SEQ ID NO: 456)
QVQLVQSGAEVKKPGASVKVSCKASGYTFTDYAMNWVRQAPGQGLEWMGVISTFSGNTNFNQKFKGRVTMTTDTSTSTAY
MELRSLRSDDTAVYYCARSDYYGPYFDYWGQGTTLTVSSASTKGPSVFPLAPCSRSTSESTAALGCLVKDYFPEPVTVSW
NSGALTSGVHTFPAVLQSSGLYSLSSVVTVPSSNFGTQTYTCNVDHKPSNTKVDKTVERKCCVECPPCPAPPVAGPSVFL
FPPKPKDTLMISRTPEVTCVVVDVSHEDPEVQFNWYVDGVEVHNAKTKPREEQFNSTFRVVSVLTVVHQDWLNGKEYKCK
VSNKGLPAPIEKTISKTKGQPREPQVYTLPPSREEMTKNQVSLTCLVKGFYPSDIAVEWESNGQPENNYKTTPPMLDSDG
SFFLYSKLTVDKSRWQQGNVFSCSVMHEALHNHYTQKSLSLSPGK**
Humanized C3 heavy chain IgG1 gBLOCK sequence:
(DNA)
(SEQ ID NO: 457)
tgctctgggttccaggttccactggtgacgcggcccagccggcccaggttcagctggtgcagtctggagctgaggtgaaga
agcctggggcctcagtgaaggtctcctgcaaggcttctggttacacctttaccgactacgccatgaactgggtgcgacagg
cccctggacaagggcttgagtggatgggagtgatcagcaccttcagcggtaacacaaacttcaaccagaagttcaagggca
gagtcaccatgaccacagacacatccacgagcacagcctacatggagctgaggagcctgagatctgacgacacggccgtgt
attactgtgcgagaagcgactactacggcccatacttcgactactggggccagggcaccaccctgaccgtgtccagcgcta
gcaccaagggcccatcggtcttccccctggcaccctcctccaagagcacctctgggggcacagcggccctgggctgcctgg
tcaaggactacttccccgaaccggtgacggtgtcgtggaactcaggcgccctgaccagc
Mouse C3 Light Chain variable region sequence:
(DNA)
(SEQ ID NO: 458)
gatgttttgatgacccaaactccactctccctgcctgtcagtcttggagatcaagcctccatctcttgcagatctagtcag
accattgtacatagtaatggaaacacctatttagaatggtacctgcagaaaccaggccagtctccaaagctcctgatctac
aaagtttccaaccgattttctggggtcccagacaggttcagtggcagtggatcagggacagatttcacactcaagatcaac
agagtggaggctgaggatctgggagtttattactgctttcaaggttcacatgttccattcacgttcggctcggggacaaag
ttggaaataaaa
(amino acids)
(SEQ ID NO: 459)
DVLMTQTPLSLPVSLGDQASISCRSSQTIVHSNGNTYLEWYLQKPGQSPKLLIYKVSNRFSGVPDRFSGSGSGTDFTLKIN
RVEAEDLGVYYCFQGSHVPFTFGSGTKLEIK
Mouse C3 light chain variable framework region 1 (FWR1) sequence:
(DNA)
(SEQ ID NO: 460)
gatgttttgatgacccaaactccactctccctgcctgtcagtcttggagatcaagcctccatctcttgc
(amino acids)
(SEQ ID NO: 461)
DVLMTQTPLSLPVSLGDQASISC
Mouse C3 light chain variable complementarity determining regions 1 (CDR1)
sequence:
(DNA)
(SEQ ID NO: 462)
agatctagtcagaccattgtacatagtaatggaaacacctatttagaa
(amino acids)
(SEQ ID NO: 463)
RSSQTIVHSNGNTYLE
Mouse C3 light chain variable framework region 2 (FWR2) sequence:
(DNA)
(SEQ ID NO: 464)
tggtacctgcagaaaccaggccagtctccaaagctcctgatctac
(amino acids)
(SEQ ID NO: 465)
WYLQKPGQSPKLLIY
Mouse C3 light chain variable complementarity determining regions 2 (CDR2)
sequence:
(DNA)
(SEQ ID NO: 466)
aaagtttccaaccgattttct
(amino acids)
(SEQ ID NO: 467)
KVSNRFS
Mouse C3 light chain variable framework region 3 (FWR3) sequence:
(DNA)
(SEQ ID NO: 468)
ggggtcccagacaggttcagtggcagtggatcagggacagatttcacactcaagatcaacagagtggaggctgaggatct
gggagtttattactgc
(amino acids)
(SEQ ID NO: 469)
GVPDRFSGSGSGTDFTLKINRVEAEDLGVYYC
Mouse C3 light chain variable complementarity determining regions 3 (CDR3)
sequence:
(DNA)
(SEQ ID NO: 470)
tttcaaggttcacatgttccattcacg
(amino acids)
(SEQ ID NO: 471)
FQGSHVPFT
IGKV2-29*03 light chain variable region sequence:
(DNA)
(SEQ ID NO: 472)
gatattgtgatgacccagactccactctctctgtccgtcacccctggacagccggcctccatctcctgcaagtctagtca
gagcctcctgcatagtgatggaaagacctatttgtattggtacctgcagaagccaggccagtctccacagctcctgatct
atgaagtttccagccggttctctggagtgccagataggttcagtggcagcgggtcagggacagatttcacactgaaaatc
agccgggtggaggctgaggatgttggggtttattactgcatgcaaggtatacaccttcct
(amino acids)
(SEQ ID NO: 473)
DIVMTQTPLSLSVTPGQPASISCKSSQSLLHSDGKTYLYWYLQKPGQSPQLLIYEVSSRFSGVPDRFSGSGSGTDFTLKI
SRVEAEDVGVYYCMQGIHLP
IGKV2-29*03 light chain variable framework region 1 (FWR1) acid sequence:
(DNA)
(SEQ ID NO: 474)
gatattgtgatgacccagactccactctctctgtccgtcacccctggacagccggcctccatctcctgc
(amino acids)
(SEQ ID NO: 475)
DIVMTQTPLSLSVTPGQPASISC
IGKV2-29*03 light chain variable complementarity determining regions 1 (CDR1)
sequence:
(DNA)
(SEQ ID NO: 476)
aagtctagtcagagcctcctgcatagtgatggaaagacctatttgtat
(amino acids)
(SEQ ID NO: 477)
KSSQSLLHSDGKTYLY
IGKV2-29*03 light chain variable framework region 2 (FWR2) sequence:
(DNA)
(SEQ ID NO: 478)
tggtacctgcagaagccaggccagtctccacagctcctgatctat
(amino acids)
(SEQ ID NO: 479)
WYLQKPGQSPQLLIY
IGKV2-29*03 light chain variable complementarity determining regions 2 (CDR2)
sequence:
(DNA)
(SEQ ID NO: 480)
gaagtttccagccggttc
(amino acids)
(SEQ ID NO: 481)
EVSSRFS
IGKV2-29*03 light chain variable framework region 3 (FWR3) sequence:
(DNA)
(SEQ ID NO: 482)
ggagtgccagataggttcagtggcagcgggtcagggacagatttcacactgaaaatcagccgggtggaggctgaggatgt
tggggtttattactgc
(amino acids)
(SEQ ID NO: 483)
GVPDRFSGSGSGTDFTLKISRVEAEDVGVYYC
IGKV2-29*03 light chain variable complementarity determining regions3 (CDR3)
sequence:
(DNA)
(SEQ ID NO: 484)
atgcaaggtatacaccttcct
(amino acids)
(SEQ ID NO: 485)
MQGIHLP
Humanized C3 light chain variable region sequence:
(DNA)
(SEQ ID NO: 486)
gatattgtgatgacccagactccactctctctgtccgtcacccctggacagccggcctccatctcctgcaggtctagtcag
accattgtccatagtaatggaaacacctatttggagtggtacctgcagaagccaggccagtctccacagctcctgatctat
aaggtttccaaccggttctctggagtgccagataggttcagtggcagcgggtcagggacagatttcacactgaaaatcagc
cgggtggaggctgaggatgttggggtttattactgcttccaaggtagccacgtgcctttcaccttcggcggagggaccaag
gtggagatcaaacgaact
(amino acids)
(SEQ ID NO: 487)
DIVMTQTPLSLSVTPGQPASISCRSSQTIVHSNGNTYLEWYLQKPGQSPQLLIYKVSNRFSGVPDRFSGSGSGTDFTLKI
SRVEAEDVGVYYCFQGSHVPFTFGGGTKVEIKRT
Humanized C3 light chain variable framework region 1 (FWR1) acid sequence:
(DNA)
(SEQ ID NO: 488)
gatattgtgatgacccagactccactctctctgtccgtcacccctggacagccggcctccatctcctgc
(amino acids)
(SEQ ID NO: 489)
DIVMTQTPLSLSVTPGQPASISC
Humanized C3 light chain variable complementarity determining regions 1 (CDR1)
sequence:
(DNA)
(SEQ ID NO: 490)
ggtctagtcagaccattgtccatagtaatggaaacacctatttggag
(amino acids)
(SEQ ID NO: 491)
RSSQTIVHSNGNTYLE
Humanized C3 light chain variable framework region 2 (FWR2) acid sequence:
(DNA)
(SEQ ID NO: 492)
tggtacctgcagaagccaggccagtctccacagctcctgatctat
(amino acids)
(SEQ ID NO: 493)
WYLQKPGQSPQLLIY
Humanized C3 light chain variable complementarity determining regions 2 (CDR2)
sequence:
(DNA)
(SEQ ID NO: 494)
aaggtttccaaccggttctct
(amino acids)
(SEQ ID NO: 495)
KVSNRFS
Humanized C3 light chain variable framework region 3 (FWR3) acid sequence:
(DNA)
(SEQ ID NO: 496)
ggagtgccagataggttcagtggcagcgggtcagggacagatttcacactgaaaatcagccgggtggaggctgaggatgtt
ggggtttattactgc
(amino acids)
(SEQ ID NO: 497)
GVPDRFSGSGSGTDFTLKISRVEAEDVGVYYC
Humanized C3 light chain variable complementarity determining regions 3 (CDR3)
sequence:
(DNA)
(SEQ ID NO: 498)
ttccaaggtagccacgtgcctttcacc
(amino acids)
(SEQ ID NO: 499)
FQGSHVPFT
Humanized C3 lambda light chain sequence
(DNA)
(SEQ ID NO: 500)
gatattgtgatgacccagactccactctctctgtccgtcacccctggacagccggcctccatctcctgcaggtctagtcag
accattgtccatagtaatggaaacacctatttggagtggtacctgcagaagccaggccagtctccacagctcctgatctat
aaggtttccaaccggttctctggagtgccagataggttcagtggcagcgggtcagggacagatttcacactgaaaatcagc
cgggtggaggctgaggatgttggggtttattactgcttccaaggtagccacgtgcctttcaccttcggcggagggaccaag
gtggagatcaaacgaactggtcagcccaaggctgccccctcggtcactctgttcccgccctcctctgaggagcttcaagcc
aacaaggccacactggtgtgtctcataagtgacttctacccgggagccgtgacagtggcctggaaggcagatagcagcccc
gtcaaggcgggagtggagaccaccacaccctccaaacaaagcaacaacaagtacgcggccagcagctatctgagcctgacg
cctgagcagtggaagtcccacagaagctacagctgccaggtcacgcatgaagggagcaccgtggagaagacagtggcccct
acagaatgttcatagtaa
(amino acids)
(SEQ ID NO: 501)
DIVMTQTPLSLSVTPGQPASISCRSSQTIVHSNGNTYLEWYLQKPGQSPQLLIYKVSNRFSGVPDRFSGSGSGTDFTLKI
SRVEAEDVGVYYCFQGSHVPFTFGGGTKVEIKRTGQPKAAPSVTLFPPSSEELQANKATLVCLISDFYPGAVTVAWKADS
SPVKAGVETTTPSKQSNNKYAASSYLSLTPEQWKSHRSYSCQVTHEGSTVEKTVAPTECS**
Humanized C3 Kappa light chain
(DNA)
(SEQ ID NO: 502)
gatattgtgatgacccagactccactctctctgtccgtcacccctggacagccggcctccatctcctgcaggtctagtcag
accattgtccatagtaatggaaacacctatttggagtggtacctgcagaagccaggccagtctccacagctcctgatctat
aaggtttccaaccggttctctggagtgccagataggttcagtggcagcgggtcagggacagatttcacactgaaaatcagc
cgggtggaggctgaggatgttggggtttattactgcttccaaggtagccacgtgcctttcaccttcggcggagggaccaag
gtggagatcaaacgaactacggtggctgcaccatctgtcttcatcttcccgccatctgatgagcagttgaaatctggaact
gcctctgttgtgtgcctgctgaataacttctatcccagagaggccaaagtacagtggaaggtggataacgccctccaatcg
ggtaactcccaggagagtgtcacagagcaggacagcaaggacagcacctacagcctcagcagcaccctgacgctgagcaaa
gcagactacgagaaacacaaagtctacgcctgcgaagtcacccatcagggcctgagctcgcccgtcacaaagagcttcaac
aggggagagtgttagtaa
(amino acids)
(SEQ ID NO: 503)
DIVMTQTPLSLSVTPGQPASISCRSSQTIVHSNGNTYLEWYLQKPGQSPQLLIYKVSNRFSGVPDRFSGSGSGTDFTLKI
SRVEAEDVGVYYCFQGSHVPFTFGGGTKVEIKRTTVAAPSVFIFPPSDEQLKSGTASVVCLLNNFYPREAKVQWKVDNAL
QSGNSQESVTEQDSKDSTYSLSSTLTLSKADYEKHKVYACEVTHQGLSSPVTKSFNRGEC**
Humanized C3 Kappa light gBLOCK sequence:
(DNA)
(SEQ ID NO: 504)
agctggctaggtaagcttggtaccgagctcggatccacgccaccatggagacagacacactcctgctatgggtactgctgc
tctgggttccaggttccactggtgacgatattgtgatgacccagactccactctctctgtccgtcacccctggacagccgg
cctccatctcctgcaggtctagtcagaccattgtccatagtaatggaaacacctatttggagtggtacctgcagaagccag
gccagtctccacagctcctgatctataaggtttccaaccggttctctggagtgccagataggttcagtggcagcgggtcag
ggacagatttcacactgaaaatcagccgggtggaggctgaggatgttggggtttattactgcttccaaggtagccacgtgc
ctttcaccttcggcggagggaccaaggtggagatcaaacgaactacggtggctgcaccatctgtcttcatcttcccgccat
ctgatgagcagttgaaatctggaactgcctctgttgtgtgcctgctgaataacttctatcccagagaggccaaagtacagt
ggaaggtggataacgccctccaatcgggtaactcccaggagagtgtcacagagcaggacagcaaggacagcacctacagcc
tcagcagcaccctgacgctgagcaaagcagactacgagaaacacaaagtctacgcctgcgaagtcacccatcagggcctga
gctcgcccgtcacaaagagcttcaacaggggagagtgttagtaagtttaaacccgctgatcagcctcgactgtgccttcta
gttgc
Mouse C8 heavy chain variable region sequence
(DNA)
(SEQ ID NO: 505)
gaagtgatggtcgtggaaagcggcggtggtctggtaaagccggggggatcccttaagctttcttgcgccgcatccgggttc
acgttctccggctatgccatgtcctgggtccgacagactcccgaaaagcgcttggaatgggtggccactatctcctccggg
gggacgtacatctactaccccgacagtgtgaaaggaagatttacaatatctcgcgacaacgcaaaaaataccttgtatctt
caaatgagctccctgcggtcagaggacactgccatgtactattgcgcccgcctgggcggcgacaattactatgagtat
(amino acids)
(SEQ ID NO: 506)
EVMVVESGGGLVKPGGSLKLSCAASGFTFSGYAMSWVRQTPEKRLEWVATISSGGTYIYYPDSVKGRFTISRDNAKNTLYL
QMSSLRSEDTAMYYCARLGGDNYYEY
Mouse C8 heavy chain variable complementarity determining region 1 (CDR1)
sequence:
(DNA)
(SEQ ID NO: 507)
ggctatgccatgtcc
(amino acids)
(SEQ ID NO: 508)
GYAMS
Mouse C8 heavy chain variable complementarity determining region 2 (CDR2)
sequence:
(DNA)
(SEQ ID NO: 509)
actatctcctccggggggacgtacatctactaccccgacagtgtgaaagga
(amino acids)
(SEQ ID NO: 510)
TISSGGTYIYYPDSVKG
Mouse C8 heavy chain variable complementarity determining region 3 (CDR3)
sequence:
(DNA)
(SEQ ID NO: 511)
ctgggcggcgacaattactatgagtat
(amino acids)
(SEQ ID NO: 512)
LGGDNYYEY
IGHV3-21*04 heavy chain variable region sequence:
(DNA)
(SEQ ID NO: 513)
gaggtgcagctggtggagtctgggggaggcctggtcaagcctggggggtccctgagactctcctgtgcagcctctggatt
caccttcagtagctatagcatgaactgggtccgccaggctccagggaaggggctggagtgggtctcatccattagtagta
gtagtagttacatatactacgcagactcagtgaagggccgattcaccatctccagagacaacgccaagaactcactgtat
ctgcaaatgaacagcctgagagccgaggacacggccgtgtattactgtgcga
(amino acids)
(SEQ ID NO: 514)
EVQLVESGGGLVKPGGSLRLSCAASGFTFSSYSMNWVRQAPGKGLEWVSSISSSSSYIYYADSVKGRFTISRDNAKNSLY
LQMNSLRAEDTAVYYCAR
IGHV3-21*04 heavy chain variable framework region 1 (FWR1) sequence:
(DNA)
(SEQ ID NO: 515)
gaggtgcagctggtggagtctgggggaggcctggtcaagcctggggggtccctgagactctcctgtgcagcctctggatt
caccttcagt
(amino acids)
(SEQ ID NO: 516)
EVQLVESGGGLVKPGGSLRLSCAASGFTFS
IGHV3-21*04 heavy chain variable complementarity determining regions 1 (CDR1)
sequence:
(DNA)
(SEQ ID NO: 517)
agctatagcatgaac
(amino acids)
(SEQ ID NO: 518)
SYSMN
IGHV3-21*04 heavy chain variable framework region 2 (FWR2) sequence:
(DNA)
(SEQ ID NO: 519)
tgggtccgccaggctccagggaaggggctggagtgggtc
(amino acids)
(SEQ ID NO: 520)
WVRQAPGKGLEWV
IGHV3-21*04 heavy chain variable complementarity determining regions 2 (CDR2)
sequence:
(DNA)
(SEQ ID NO: 521)
tcatccattagtagtagtagtagttacatatactacgcagactcagtgaagggc
(amino acids)
(SEQ ID NO: 522)
SSISSSSSYIYYADSVKG
IGHV3-21*04 heavy chain variable framework region 3 (FWR3) sequence:
(DNA)
(SEQ ID NO: 523)
cgattcaccatctccagagacaacgccaagaactcactgtatctgcaaatgaacagcctgagagccgaggacacggccgt
gtattactgtgcga
(amino acids)
(SEQ ID NO: 524)
RFTISRDNAKNSLYLQMNSLRAEDTAVYYCAR
Humanized C8 heavy chain variable region sequence:
(DNA)
(SEQ ID NO: 525)
gaggtgcagctggtggagtctgggggaggcctggtcaagcctggggggtccctgagactctcctgtgcagcctctggattc
accttcagtggctatgccatgagctgggtccgccaggctccagggaaggggctggagtgggtctcaaccattagtagtggc
ggaacctacatatactaccctgactcagtgaagggccgattcaccatctccagagacaacgccaagaactcactgtatctg
caaatgaacagcctgagagccgaggacacggccgtgtattactgtgcgagactgggcggcgataactattatgaatattgg
ggcaaagggaccacggtcaccgtctcctcc
(amino acids)
(SEQ ID NO: 526)
EVQLVESGGGLVKPGGSLRLSCAASGFTFSGYAMSWVRQAPGKGLEWVSTISSGGTYIYYPDSVKGRFTISRDNAKNSLY
LQMNSLRAEDTAVYYCARLGGDNYYEYWGKGTTVTVSS
Humanized C8 heavy chain variable framework region 1 (FWR1) sequence:
(DNA)
(SEQ ID NO: 527)
gaggtgcagctggtggagtctgggggaggcctggtcaagcctggggggtccctgagactctcctgtgcagcctctggattc
accttcagt
(amino acids)
(SEQ ID NO: 528)
EVQLVESGGGLVKPGGSLRLSCAASGFTFS
Humanized C8 heavy chain variable complementarity determining region 1 (CDR1)
sequence:
(DNA)
(SEQ ID NO: 529)
ggctatgccatgagc
(amino acids)
(SEQ ID NO: 530)
GYAMS
Humanized C8 heavy chain variable framework region 2 (FWR2) sequence:
(DNA)
(SEQ ID NO: 531)
tgggtccgccaggctccagggaaggggctggagtgggtctca
(amino acids)
(SEQ ID NO: 532)
WVRQAPGKGLEWVS
Humanized C8 heavy chain variable complementarity determining region 2 (CDR2)
sequence:
(DNA)
(SEQ ID NO: 533)
accattagtagtggcggaacctacatatactaccctgactcagtgaagggc
(amino acids)
(SEQ ID NO: 534)
TISSGGTYIYYPDSVKG
Humanized C8 heavy chain variable framework region 3 (FWR3) sequence:
(DNA)
(SEQ ID NO: 535)
cgattcaccatctccagagacaacgccaagaactcactgtatctgcaaatgaacagcctgagagccgaggacacggccgtg
tattactgtgcgaga
(amino acids)
(SEQ ID NO: 536)
RFTISRDNAKNSLYLQMNSLRAEDTAVYYCAR
Humanized C8 heavy chain variable complementarity determining region 3 (CDR3)
sequence:
(DNA)
(SEQ ID NO: 537)
ctgggcggcgataactattatgaatat
(amino acids)
(SEQ ID NO: 538)
LGGDNYYEY
Humanized C8 IgG1 heavy chain sequence
(DNA)
(SEQ ID NO: 539)
gaggtgcagctggtggagtctgggggaggcctggtcaagcctggggggtccctgagactctcctgtgcagcctctggattc
accttcagtggctatgccatgagctgggtccgccaggctccagggaaggggctggagtgggtctcaaccattagtagtggc
ggaacctacatatactaccctgactcagtgaagggccgattcaccatctccagagacaacgccaagaactcactgtatctg
caaatgaacagcctgagagccgaggacacggccgtgtattactgtgcgagactgggcggcgataactattatgaatattgg
ggcaaagggaccacggtcaccgtctcctccgctagcaccaagggcccatcggtcttccccctggcaccctcctccaagagc
acctctgggggcacagcggccctgggctgcctggtcaaggactacttccccgaaccggtgacggtgtcgtggaactcaggc
gccctgaccagcggcgtgcacaccttcccggctgtcctacagtcctcaggactctactccctcagcagcgtggtgacagtg
ccctccagcagcttgggcacccagacctacatctgcaacgtgaatcacaagcccagcaacaccaaggtggacaagaaagtt
gagcccaaatcttgtgacaaaactcacacatgcccaccgtgcccagcacctgaactcctggggggaccgtcagtcttcctc
ttccccccaaaacccaaggacaccctcatgatctcccggacccctgaggtcacatgcgtggtggtggacgtgagccacgaa
gaccctgaggtcaagttcaactggtacgtggacggcgtggaggtgcataatgccaagacaaagccgcgggaggagcagtac
aacagcacgtaccgtgtggtcagcgtcctcaccgtcctgcaccaggactggctgaatggcaaggagtacaagtgcaaggtc
tccaacaaagccctcccagcccccatcgagaaaaccatctccaaagccaaagggcagccccgagaaccacaggtgtacacc
ctgcccccatcccgggaggagatgaccaagaaccaggtcagcctgacctgcctggtcaaaggcttctatcccagcgacatc
gccgtggagtgggagagcaatgggcagccggagaacaactacaagaccacgcctcccgtgctggactccgacggctccttc
ttcctctacagcaagctcaccgtggacaagagcaggtggcagcaggggaacgtcttctcatgctccgtgatgcatgaggct
ctgcacaaccactacacgcagaagagcctctccctgtctccgggtaaatgataa
(amino acids)
(SEQ ID NO: 540)
EVQLVESGGGLVKPGGSLRLSCAASGFTFSGYAMSWVRQAPGKGLEWVSTISSGGTYIYYPDSVKGRFTISRDNAKNSLYL
QMNSLRAEDTAVYYCARLGGDNYYEYWGKGTTVTVSSASTKGPSVFPLAPSSKSTSGGTAALGCLVKDYFPEPVTVSWNSG
ALTSGVHTFPAVLQSSGLYSLSSVVTVPSSSLGTQTYICNVNHKPSNTKVDKKVEPKSCDKTHTCPPCPAPELLGGPSVFL
FPPKPKDTLMISRTPEVTCVVVDVSHEDPEVKFNWYVDGVEVHNAKTKPREEQYNSTYRVVSVLTVLHQDWLNGKEYKCKV
SNKALPAPIEKTISKAKGQPREPQVYTLPPSREEMTKNQVSLTCLVKGFYPSDIAVEWESNGQPENNYKTTPPVLDSDGSF
FLYSKLTVDKSRWQQGNVFSCSVMHEALHNHYTQKSLSLSPGK**
Humanized C8 IgG2 heavy chain sequence
(DNA)
(SEQ ID NO: 541)
gaggtgcagctggtggagtctgggggaggcctggtcaagcctggggggtccctgagactctcctgtgcagcctctggattc
accttcagtggctatgccatgagctgggtccgccaggctccagggaaggggctggagtgggtctcaaccattagtagtggc
ggaacctacatatactaccctgactcagtgaagggccgattcaccatctccagagacaacgccaagaactcactgtatctg
caaatgaacagcctgagagccgaggacacggccgtgtattactgtgcgagactgggcggcgataactattatgaatattgg
ggcaaagggaccacggtcaccgtctcctccgcctccaccaagggcccatcggtcttccccctggcgccctgctccaggagc
acctccgagagcacagccgccctgggctgcctggtcaaggactacttccccgaaccggtgacggtgtcgtggaactcaggc
gctctgaccagcggcgtgcacaccttcccagctgtcctacagtcctcaggactctactccctcagcagcgtggtgaccgtg
ccctccagcaacttcggcacccagacctacacctgcaacgtagatcacaagcccagcaacaccaaggtggacaagacagtt
gagcgcaaatgttgtgtcgagtgcccaccgtgcccagcaccacctgtggcaggaccgtcagtcttcctcttccccccaaaa
cccaaggacaccctcatgatctcccggacccctgaggtcacgtgcgtggtggtggacgtgagccacgaagaccccgaggtc
cagttcaactggtacgtggacggcgtggaggtgcataatgccaagacaaagccacgggaggagcagttcaacagcacgttc
cgtgtggtcagcgtcctcaccgttgtgcaccaggactggctgaacggcaaggagtacaagtgcaaggtctccaacaaaggc
ctcccagcccccatcgagaaaaccatctccaaaaccaaagggcagccccgagaaccacaggtgtacaccctgcccccatcc
cgggaggagatgaccaagaaccaggtcagcctgacctgcctggtcaaaggcttctaccccagcgacatcgccgtggagtgg
gagagcaatgggcagccggagaacaactacaagaccacacctcccatgctggactccgacggctccttcttcctctacagc
aagctcaccgtggacaagagcaggtggcagcaggggaacgtcttctcatgctccgtgatgcatgaggctctgcacaaccac
tacacgcagaagagcctctccctgtctccgggtaaatagtaa
(amino acids)
(SEQ ID NO: 542)
EVQLVESGGGLVKPGGSLRLSCAASGFTFSGYAMSWVRQAPGKGLEWVSTISSGGTYIYYPDSVKGRFTISRDNAKNSLYL
QMNSLRAEDTAVYYCARLGGDNYYEYWGKGTTVTVSSASTKGPSVFPLAPCSRSTSESTAALGCLVKDYFPEPVTVSWNSG
ALTSGVHTFPAVLQSSGLYSLSSVVTVPSSNFGTQTYTCNVDHKPSNTKVDKTVERKCCVECPPCPAPPVAGPSVFLFPPK
PKDTLMISRTPEVTCVVVDVSHEDPEVQFNWYVDGVEVHNAKTKPREEQFNSTFRVVSVLTVVHQDWLNGKEYKCKVSNKG
LPAPIEKTISKTKGQPREPQVYTLPPSREEMTKNQVSLTCLVKGFYPSDIAVEWESNGQPENNYKTTPPMLDSDGSFFLYS
KLTVDKSRWQQGNVFSCSVMHEALHNHYTQKSLSLSPGK**
Mouse C8 light chain variable region sequence
(DNA)
(SEQ ID NO: 543)
gacatcgtcattacgcagacccctgccagtcttgccgtttctctgggccagagggccactatcagttacagggcgagtaag
tctgtgagtaccagcggctatagttacatgcattggaaccagcagaaaccgggacagccaccacgcctgcttatttatctg
gtgtctaatcttgagtccggggtgcccgccaggttcagcggcagcggctctgggaccgacttcacactcaacattcatcca
gtggaagaagaggacgctgctacatactactgtcaacacattcgggaactgaccaggagtgaa
(amino acids)
(SEQ ID NO: 544)
DIVITQTPASLAVSLGQRATISYRASKSVSTSGYSYMHWNQQKPGQPPRLLIYLVSNLESGVPARFSGSGSGTDFTLNIHP
VEEEDAATYYCQHIRELTRSE
Mouse C8 light chain variable complementarity determining region 1 (CDR1)
sequence:
(DNA)
(SEQ ID NO: 545)
agggcgagtaagtctgtgagtaccagcggctatagttacatgcat
(amino acids)
(SEQ ID NO: 546)
RASKSVSTSGYSYMH
Mouse C8 light chain variable complementarity determining region 2 (CDR2)
sequence:
(DNA)
(SEQ ID NO: 547)
ctggtgtctaatcttgagtcc
(amino acids)
(SEQ ID NO: 548)
LVSNLES
Mouse C8 light chain variable complementarity determining region 3 (CDR3)
sequence:
(DNA)
(SEQ ID NO: 549)
caacacattcgggaactgaccaggagtgaa
(amino acids)
(SEQ ID NO: 550)
QHIRELTRSE
NCBI germline z00023 light chain variable region sequence:
(DNA)
(SEQ ID NO: 551)
gacatcgtgatgacccagtctccagactccctggctgtgtctctgggcgagagggccaccatcaactgcaagtccagccag
agtgttttatacagctccaacaataagaactacttagcttggtaccagcagaaaccaggacagcctcctaagctgctcatt
tactgggcatctacccgggaatccggggtccctgaccgattcagtggcagcgggtctgggacagatttcactctcaccatc
agcagcctgcaggctgaagatgtggcagtttattactgtcagcaatattatagtactcct
(amino acids)
(SEQ ID NO: 552)
DIVMTQSPDSLAVSLGERATINCKSSQSVLYSSNNKNYLAWYQQKPGQPPKLLIYWASTRESGVPDRFSGSGSGTDFTLT
ISSLQAEDVAVYYCQQYYSTP
NCBI germline z00023 light chain variable framework region 1 (FWR1) acid
sequence:
(DNA)
(SEQ ID NO: 553)
gacatcgtgatgacccagtctccagactccctggctgtgtctctgggcgagagggccaccatcaactgc
(amino acids)
(SEQ ID NO: 554)
DIVMTQSPDSLAVSLGERATINC
NCBI germline z00023 light chain variable complementarity determining regions 1
(CDR1) sequence:
(DNA)
(SEQ ID NO: 555)
aagtccagccagagtgttttatacagctccaacaataagaactacttagct
(amino acids)
(SEQ ID NO: 556)
KSSQSVLYSSNNKNYLA
NCBI germline z00023 light chain variable framework region 2 (FWR2) sequence:
(DNA)
(SEQ ID NO: 557)
tggtaccagcagaaaccaggacagcctcctaagctgctcatttac
(amino acids)
(SEQ ID NO: 558)
WYQQKPGQPPKLLIY
NCBI germline z00023 light chain variable complementarity determining regions 2
(CDR2) sequence:
(DNA)
(SEQ ID NO: 559)
tgggcatctacccgggaatcc
(amino acids)
(SEQ ID NO: 560)
WASTRES
NCBI germline z00023 light chain variable framework region 3 (FWR3) sequence:
(DNA)
(SEQ ID NO: 561)
ggggtccctgaccgattcagtggcagcgggtctgggacagatttcactctcaccatcagcagcctgcaggctgaagatgt
ggcagtttattactgt
(amino acids)
(SEQ ID NO: 562)
GVPDRFSGSGSGTDFTLTISSLQAEDVAVYYC
NCBI germline z00023 light chain variable complementarity determining regions3
(CDR3) sequence:
(DNA)
(SEQ ID NO: 563)
cagcaatattatagtactcct
(amino acids)
(SEQ ID NO: 564)
QQYYSTP
Humanized C8 light chain variable region sequence
(DNA)
(SEQ ID NO: 565)
gacatcgtgatgacccagtctccagactccctggctgtgtctctgggcgagagggccaccatcaactgcagggccagcaag
agtgttagcaccagcggctacagctacatgcactggtaccagcagaaaccaggacagcctcctaagctgctcatttacctg
gtgtctaacctggaatccggggtccctgaccgattcagtggcagcgggtctgggacagatttcactctcaccatcagcagc
ctgcaggctgaagatgtggcagtttattactgtcaacacattcgggaactgaccaggagtgaattcggcggagggaccaag
gtggagatcaaacgaact
(amino acids)
(SEQ ID NO: 566)
DIVMTQSPDSLAVSLGERATINCRASKSVSTSGYSYMHWYQQKPGQPPKLLIYLVSNLESGVPDRFSGSGSGTDFTLTIS
SLQAEDVAVYYCQHIRELTRSEFGGGTKVEIKRT
Humanized C8 light chain variable framework region 1 (FWR1) sequence:
(DNA)
(SEQ ID NO: 567)
gacatcgtgatgacccagtctccagactccctggctgtgtctctgggcgagagggccaccatcaactgc
(amino acids)
(SEQ ID NO: 568)
DIVMTQSPDSLAVSLGERATINC
Humanized C8 light chain variable complementarity determining region 1 (CDR1)
sequence:
(DNA)
(SEQ ID NO: 569)
agggccagcaagagtgttagcaccagcggctacagctacatg
(amino acids)
(SEQ ID NO: 570)
RASKSVSTSGYSYM
Humanized C8 light chain variable framework region 2 (FWR2) sequence:
(DNA)
(SEQ ID NO: 571)
cactggtaccagcagaaaccaggacagcctcctaagctgctcatttac
(amino acids)
(SEQ ID NO: 572)
HWYQQKPGQPPKLLIY
Humanized C8 light chain variable complementarity determining region 2 (CDR2)
sequence:
(DNA)
(SEQ ID NO: 573)
ctggtgtctaacctggaatcc
(amino acids)
(SEQ ID NO: 574)
LVSNLES
Humanized C8 light chain variable framework region 3 (FWR3) sequence:
(DNA)
(SEQ ID NO: 575)
ggggtccctgaccgattcagtggcagcgggtctgggacagatttcactctcaccatcagcagcctgcaggctgaagatgtg
gcagtttattactgt
(amino acids)
(SEQ ID NO: 576)
GVPDRFSGSGSGTDFTLTISSLQAEDVAVYYC
Humanized C8 light chain variable complementarity determining region 3 (CDR3)
sequence:
(DNA)
(SEQ ID NO: 577)
caacacattcgggaactgaccaggagtgaa
(amino acids)
(SEQ ID NO: 578)
QHIRELTRSE
Humanized C8 Lambda light chain sequence
(DNA)
(SEQ ID NO: 579)
gacatcgtgatgacccagtctccagactccctggctgtgtctctgggcgagagggccaccatcaactgcagggccagcaag
agtgttagcaccagcggctacagctacatgcactggtaccagcagaaaccaggacagcctcctaagctgctcatttacctg
gtgtctaacctggaatccggggtccctgaccgattcagtggcagcgggtctgggacagatttcactctcaccatcagcagc
ctgcaggctgaagatgtggcagtttattactgtcaacacattcgggaactgaccaggagtgaattcggcggagggaccaag
gtggagatcaaacgaactggtcagcccaaggctgccccctcggtcactctgttcccgccctcctctgaggagcttcaagcc
aacaaggccacactggtgtgtctcataagtgacttctacccgggagccgtgacagtggcctggaaggcagatagcagcccc
gtcaaggcgggagtggagaccaccacaccctccaaacaaagcaacaacaagtacgcggccagcagctatctgagcctgacg
cctgagcagtggaagtcccacagaagctacagctgccaggtcacgcatgaagggagcaccgtggagaagacagtggcccct
acagaatgttcatagtaa
(amino acids)
(SEQ ID NO: 580)
DIVMTQSPDSLAVSLGERATINCRASKSVSTSGYSYMHWYQQKPGQPPKLLIYLVSNLESGVPDRFSGSGSGTDFTLTISS
LQAEDVAVYYCQHIRELTRSEFGGGTKVEIKRTGQPKAAPSVTLFPPSSEELQANKATLVCLISDFYPGAVTVAWKADSSP
VKAGVETTTPSKQSNNKYAASSYLSLTPEQWKSHRSYSCQVTHEGSTVEKTVAPTECS**
Humanized C8 Kappa light chain sequence
(DNA)
(SEQ ID NO: 581)
gacatcgtgatgacccagtctccagactccctggctgtgtctctgggcgagagggccaccatcaactgcagggccagcaag
agtgttagcaccagcggctacagctacatgcactggtaccagcagaaaccaggacagcctcctaagctgctcatttacctg
gtgtctaacctggaatccggggtccctgaccgattcagtggcagcgggtctgggacagatttcactctcaccatcagcagc
ctgcaggctgaagatgtggcagtttattactgtcaacacattcgggaactgaccaggagtgaattcggcggagggaccaag
gtggagatcaaacgaactacggtggctgcaccatctgtcttcatcttcccgccatctgatgagcagttgaaatctggaact
gcctctgttgtgtgcctgctgaataacttctatcccagagaggccaaagtacagtggaaggtggataacgccctccaatcg
ggtaactcccaggagagtgtcacagagcaggacagcaaggacagcacctacagcctcagcagcaccctgacgctgagcaaa
gcagactacgagaaacacaaagtctacgcctgcgaagtcacccatcagggcctgagctcgcccgtcacaaagagcttcaac
aggggagagtgttagtaa
(amino acids)
(SEQ ID NO: 582)
DIVMTQSPDSLAVSLGERATINCRASKSVSTSGYSYMHWYQQKPGQPPKLLIYLVSNLESGVPDRFSGSGSGTDFTLTISS
LQAEDVAVYYCQHIRELTRSEFGGGTKVEIKRTTVAAPSVFIFPPSDEQLKSGTASVVCLLNNFYPREAKVQWKVDNALQS
GNSQESVTEQDSKDSTYSLSSTLTLSKADYEKHKVYACEVTHQGLSSPVTKSFNRGEC**
Humanized C8 Kappa light chain gBLOCk sequence:
(DNA)
(SEQ ID NO: 583)
agctggctaggtaagcttggtaccgagctcggatccacgccaccatggagacagacacactcctgctatgggtactgctgc
tctgggttccaggttccactggtgacgacatcgtgatgacccagtctccagactccctggctgtgtctctgggcgagaggg
ccaccatcaactgcagggccagcaagagtgttagcaccagcggctacagctacatgcactggtaccagcagaaaccaggac
agcctcctaagctgctcatttacctggtgtctaacctggaatccggggtccctgaccgattcagtggcagcgggtctggga
cagatttcactctcaccatcagcagcctgcaggctgaagatgtggcagtttattactgtcaacacattcgggaactgacca
ggagtgaattcggcggagggaccaaggtggagatcaaacgaactacggtggctgcaccatctgtcttcatcttcccgccat
ctgatgagcagttgaaatctggaactgcctctgttgtgtgcctgctgaataacttctatcccagagaggccaaagtacagt
ggaaggtggataacgccctccaatcgggtaactcccaggagagtgtcacagagcaggacagcaaggacagcacctacagcc
tcagcagcaccctgacgctgagcaaagcagactacgagaaacacaaagtctacgcctgcgaagtcacccatcagggcctga
gctcgcccgtcacaaagagcttcaacaggggagagtgttagtaagtttaaacccgctgatcagcctcgactgtgccttcta
gttgc
CAR-T E6 CD8 sequence:
(DNA)
(SEQ ID NO: 584)
gaggtccagctggttgagagtggcggtgggctggttaagcctggcggctccctgcggctgagctgcgccgcgagtggattt
actttcagccgatatgggatgagttgggtgcggcaagctcccgggaagaggctggaatgggtctcaacaatctccgggggg
ggcacttacatctattaccccgactcagtcaaggggagatttaccatttcacgagacaacgctaagaataccctgtatttg
cagatgaattctctgagagcagaggacacagctgtttactattgtacccgcgacaactatggcaggaactacgactacggt
atggactattggggacaagggacattggttacagtgagcagtggcggcgggggcagcggaggaggaggcagcggtgggggg
ggcagcgagatagtgctcacgcagtcacccgcgactctcagtctctcacctggggaacgagctaccctgacgtgctctgct
acctcctcagtgtcatatattcactggtatcagcaacggcccgggcagtcccctagattgctcatttatagtacctctaat
ctggcctcaggtatccctgcacgattttctggatctggttcaggttctgattacaccctcactatctctagcctggagcct
gaagactttgccgtttattactgccagcagaggtctagctccccattcacctttgggagtgggaccaaggttgaaattaaa
acgacaaccccggcccccagaccaccaacgccagcccccaccatcgccagccaacccctgtctctgagaccagaagcctgt
aggcctgccgccggtggagctgtgcacacaagaggactggatttcgcctgtgatatctacatttgggccccgctcgcaggc
acatgtggagtgctcctcctctccctggtgattaccctgtactgctgataa
(amino acids)
(SEQ ID NO: 585)
EVQLVESGGGLVKPGGSLRLSCAASGFTFSRYGMSWVRQAPGKRLEWVSTISGGGTYIYYPDSVKGRFTISRDNAKNTLY
LQMNSLRAEDTAVYYCTRDNYGRNYDYGMDYWGQGTLVTVSSGGGGSGGGGSGGGGSEIVLTQSPATLSLSPGERATLTC
SATSSVSYIHWYQQRPGQSPRLLIYSTSNLASGIPARFSGSGSGSDYTLTISSLEPEDFAVYYCQQRSSSPFTFGSGTKV
EIKTTTPAPRPPTPAPTIASQPLSLRPEACRPAAGGAVHTRGLDFACDIYIWAPLAGTCGVLLLSLVITLYC**
CAR-T C2 CD8 CD8 sequence:
N-CD8ls-huMNC2scFv-CD8ecd fragment- CD8 transmembrane-C
(DNA)
(SEQ ID NO: 586)
gaagtgcagctcgtagagagtggcgggggactggtgaagcccggtggaagcctcagactcagttgcgccgcctcaggtttc
actttttcaggttacgccatgtcctgggtaagacaggcaccggggaaaggactcgagtgggtgtctactatcagctcagga
ggcacttatatatattatcctgactctgtaaaaggccgatttacgatttctcgcgacaatgcaaagaactccctctacctc
caaatgaacagtcttagggcagaagacactgctgtatactattgtgcacgcctcggcggcgacaactactacgagtacttt
gacgtgtgggggaaagggactaccgtgacagtttcaagcggaggaggtggctcaggtggaggcgggtcaggggggggagga
agtgatattgtgctcacacaatccccagcctccctggctgtgtctcccggccaacgcgctacaattacatgtcgggcctcc
aaaagcgtgagcaccagcggctacagctacatgcactggtatcaacagaaaccaggacaaccccccaaactgttgatttat
ctcgcttcaaacttggagtccggcgtgcctgcgcgcttttcagggagtgggagcggcacagattttacgctgactatcaac
cccgtagaagcaaacgatacagcgaattattattgtcaacattcccgggaactcccctttacgttcggcgggggcacaaag
gtcgaaattaagagaaccacgacaaccccggcccccagaccaccaacgccagcccccaccatcgccagccaacccctgtct
ctgagaccagaagcctgtaggcctgccgccggtggagctgtgcacacaagaggactggatttcgcctgtgatatctacatt
tgggccccgctcgcaggcacatgtggagtgctcctcctctccctggtgattaccctgtactgctgataa
(amino acids)
(SEQ ID NO: 587)
EVQLVESGGGLVKPGGSLRLSCAASGFTFSGYAMSWVRQAPGKGLEWVSTISSGGTYIYYPDSVKGRFTISRDNAKNSLY
LQMNSLRAEDTAVYYCARLGGDNYYEYFDVWGKGTTVTVSSGGGGSGGGGSGGGGSDIVLTQSPASLAVSPGQRATITCR
ASKSVSTSGYSYMHWYQQKPGQPPKLLIYLASNLESGVPARFSGSGSGTDFTLTINPVEANDTANYYCQHSRELPFTFGG
GTKVEIKRTTTTPAPRPPTPAPTIASQPLSLRPEACRPAAGGAVHTRGLDFACDIYIWAPLAGTCGVLLLSLVITLYC**
CD8/4-1BB sequence
N- CD8 transmembrane- 4-1BB-C
(DNA)
(SEQ ID NO: 588)
acgacaaccccggcccccagaccaccaacgccagcccccaccatcgccagccaacccctgtctctgagaccagaagcctgt
aggcctgccgccggtggagctgtgcacacaagaggactggatttcgcctgtgatatctacatttgggccccgctcgcaggc
acatgtggagtgctcctcctctccctggtgattaccctgtactgcaaaaggggccgcaaaaaactcctttacatttttaag
cagccttttatgaggccagtacagacgactcaagaggaagacgggtgctcatgccgctttcctgaggaggaggaaggaggg
tgcgaactgtgataa
(amino acids)
(SEQ ID NO: 589)
TTTPAPRPPTPAPTIASQPLSLRPEACRPAAGGAVHTRGLDFACDIYIWAPLAGTCGVLLLSLVITLYCKRGRKKLLYIF
KQPFMRPVQTTQEEDGCSCRFPEEEEGGCEL**
CD8/CD28 sequence
N- CD8 transmembrane- CD28-C
(DNA)
(SEQ ID NO: 590)
acgacaaccccggcccccagaccaccaacgccagcccccaccatcgccagccaacccctgtctctgagaccagaagcctgt
aggcctgccgccggtggagctgtgcacacaagaggactggatttcgcctgtgatatctacatttgggccccgctcgcaggc
acatgtggagtgctcctcctctccctggtgattaccctgtactgcagaagcaagcggtctcggctcctgcattctgattac
atgaacatgaccccaagaagaccaggccccaccaggaaacattaccagccctacgctccgccacgcgacttcgctgcctac
cggtcctgataa
(amino acids)
(SEQ ID NO: 591)
TTTPAPRPPTPAPTIASQPLSLRPEACRPAAGGAVHTRGLDFACDIYIWAPLAGTCGVLLLSLVITLYCRSKRSRLLHSD
YMNMTPRRPGPTRKHYQPYAPPRDFAAYRS**
CD8/CD3z sequence:
N- CD8 transmembrane- CD3zeta-C
(DNA)
(SEQ ID NO: 592)
acgacaaccccggcccccagaccaccaacgccagcccccaccatcgccagccaacccctgtctctgagaccagaagcctgt
aggcctgccgccggtggagctgtgcacacaagaggactggatttcgcctgtgatatctacatttgggccccgctcgcaggc
acatgtggagtgctcctcctctccctggtgattaccctgtactgccgcgttaagttctcccgatcagccgacgcgcctgct
tacaagcagggccagaaccaactgtacaacgagctgaatctcggtagacgggaagagtacgacgtgttggacaaacggaga
ggccgcgacccagaaatgggcggcaagcctcgcaggaaaaacccccaggagggactgtacaatgagttgcagaaagataag
atggcagaagcttatagcgagatcggaatgaagggggaaaggagacgagggaaaggacacgacggcctttatcagggcctg
tccacagcaacaaaagatacgtatgacgccctccatatgcaggcacttccaccacggtgataa
(amino acids)
(SEQ ID NO: 593)
TTTPAPRPPTPAPTIASQPLSLRPEACRPAAGGAVHTRGLDFACDIYIWAPLAGTCGVLLLSLVITLYCRVKFSRSADAP
AYKQGQNQLYNELNLGRREEYDVLDKRRGRDPEMGGKPRRKNPQEGLYNELQKDKMAEAYSEIGMKGERRRGKGHDGLYQ
GLSTATKDTYDALHMQALPPR**
CD8/CD28/CD3z sequence:
N- CD8 transmembrane- CD28- CD3zeta-C
(DNA)
(SEQ ID NO: 594)
acgacaaccccggcccccagaccaccaacgccagcccccaccatcgccagccaacccctgtctctgagaccagaagcctgt
aggcctgccgccggtggagctgtgcacacaagaggactggatttcgcctgtgatatctacatttgggccccgctcgcaggc
acatgtggagtgctcctcctctccctggtgattaccctgtactgcagaagcaagcggtctcggctcctgcattctgattac
atgaacatgaccccaagaagaccaggccccaccaggaaacattaccagccctacgctccgccacgcgacttcgctgcctac
cggtcccgcgttaagttctcccgatcagccgacgcgcctgcttacaagcagggccagaaccaactgtacaacgagctgaat
ctcggtagacgggaagagtacgacgtgttggacaaacggagaggccgcgacccagaaatgggcggcaagcctcgcaggaaa
aacccccaggagggactgtacaatgagttgcagaaagataagatggcagaagcttatagcgagatcggaatgaagggggaa
aggagacgagggaaaggacacgacggcctttatcagggcctgtccacagcaacaaaagatacgtatgacgccctccatatg
caggcacttccaccacggtgataa
(amino acids)
(SEQ ID NO: 595)
TTTPAPRPPTPAPTIASQPLSLRPEACRPAAGGAVHTRGLDFACDIYIWAPLAGTCGVLLLSLVITLYCRSKRSRLLHSD
YMNMTPRRPGPTRKHYQPYAPPRDFAAYRSRVKFSRSADAPAYKQGQNQLYNELNLGRREEYDVLDKRRGRDPEMGGKPR
RKNPQEGLYNELQKDKMAEAYSEIGMKGERRRGKGHDGLYQGLSTATKDTYDALHMQALPPR**
CD8/4-1BB/CD3z sequence:
N- CD8 transmembrane- 4-1BB- CD3zeta-C
(DNA)
(SEQ ID NO: 596)
acgacaaccccggcccccagaccaccaacgccagcccccaccatcgccagccaacccctgtctctgagaccagaagcctgt
aggcctgccgccggtggagctgtgcacacaagaggactggatttcgcctgtgatatctacatttgggccccgctcgcaggc
acatgtggagtgctcctcctctccctggtgattaccctgtactgcaaaaggggccgcaaaaaactcctttacatttttaag
cagccttttatgaggccagtacagacgactcaagaggaagacgggtgctcatgccgctttcctgaggaggaggaaggaggg
tgcgaactgcgcgttaagttctcccgatcagccgacgcgcctgcttacaagcagggccagaaccaactgtacaacgagctg
aatctcggtagacgggaagagtacgacgtgttggacaaacggagaggccgcgacccagaaatgggcggcaagcctcgcagg
aaaaacccccaggagggactgtacaatgagttgcagaaagataagatggcagaagcttatagcgagatcggaatgaagggg
gaaaggagacgagggaaaggacacgacggcctttatcagggcctgtccacagcaacaaaagatacgtatgacgccctccat
atgcaggcacttccaccacggtgataa
(amino acids)
(SEQ ID NO: 597)
TTTPAPRPPTPAPTIASQPLSLRPEACRPAAGGAVHTRGLDFACDIYIWAPLAGTCGVLLLSLVITLYCKRGRKKLLYIF
KQPFMRPVQTTQEEDGCSCRFPEEEEGGCELRVKFSRSADAPAYKQGQNQLYNELNLGRREEYDVLDKRRGRDPEMGGKP
RRKNPQEGLYNELQKDKMAEAYSEIGMKGERRRGKGHDGLYQGLSTATKDTYDALHMQALPPR**
CD8/CD28/4-1BB/CD3z sequence:
N- CD8 transmembrane- CD28- 4-1BB- CD3zeta-C
(DNA)
(SEQ ID NO: 598)
acgacaaccccggcccccagaccaccaacgccagcccccaccatcgccagccaacccctgtctctgagaccagaagcctgt
aggcctgccgccggtggagctgtgcacacaagaggactggatttcgcctgtgatatctacatttgggccccgctcgcaggc
acatgtggagtgctcctcctctccctggtgattaccctgtactgcagaagcaagcggtctcggctcctgcattctgattac
atgaacatgaccccaagaagaccaggccccaccaggaaacattaccagccctacgctccgccacgcgacttcgctgcctac
cggtccaaaaggggccgcaaaaaactcctttacatttttaagcagccttttatgaggccagtacagacgactcaagaggaa
gacgggtgctcatgccgctttcctgaggaggaggaaggagggtgcgaactgcgcgttaagttctcccgatcagccgacgcg
cctgcttacaagcagggccagaaccaactgtacaacgagctgaatctcggtagacgggaagagtacgacgtgttggacaaa
cggagaggccgcgacccagaaatgggcggcaagcctcgcaggaaaaacccccaggagggactgtacaatgagttgcagaaa
gataagatggcagaagcttatagcgagatcggaatgaagggggaaaggagacgagggaaaggacacgacggcctttatcag
ggcctgtccacagcaacaaaagatacgtatgacgccctccatatgcaggcacttccaccacggtgataa
(amino acids)
(SEQ ID NO: 599)
TTTPAPRPPTPAPTIASQPLSLRPEACRPAAGGAVHTRGLDFACDIYIWAPLAGTCGVLLLSLVITLYCRSKRSRLLHSD
YMNMTPRRPGPTRKHYQPYAPPRDFAAYRSKRGRKKLLYIFKQPFMRPVQTTQEEDGCSCRFPEEEEGGCELRVKFSRSA
DAPAYKQGQNQLYNELNLGRREEYDVLDKRRGRDPEMGGKPRRKNPQEGLYNELQKDKMAEAYSEIGMKGERRRGKGHDG
LYQGLSTATKDTYDALHMQALPPR**
CAR-T C3 CD8/CD8/4-1BB/CD3z sequence:
N-CD8ls-huMNC3scFv-CD8ecd fragment- CD8 transmembrane- 4-1BB- CD3zeta-C
(DNA)
(SEQ ID NO: 600)
atggccctgcccgtgaccgctttgctgctccccctggcgctgctgctgcacgccgccaggccacaggttcagctggtgcag
tctggagctgaggtgaagaagcctggggcctcagtgaaggtctcctgcaaggcttctggttacacctttaccgactacgcc
atgaactgggtgcgacaggcccctggacaagggcttgagtggatgggagtgatcagcaccttcagcggtaacacaaacttc
aaccagaagttcaagggcagagtcaccatgaccacagacacatccacgagcacagcctacatggagctgaggagcctgaga
tctgacgacacggccgtgtattactgtgcgagaagcgactactacggcccatacttcgactactggggccagggcaccacc
ctgaccgtgtccagcggcggtggcggatccggcggtggcggatccggcggtggcggatccgatattgtgatgacccagact
ccactctctctgtccgtcacccctggacagccggcctccatctcctgcaggtctagtcagaccattgtccatagtaatgga
aacacctatttggagtggtacctgcagaagccaggccagtctccacagctcctgatctataaggtttccaaccggttctct
ggagtgccagataggttcagtggcagcgggtcagggacagatttcacactgaaaatcagccgggtggaggctgaggatgtt
ggggtttattactgcttccaaggtagccacgtgcctttcaccttcggcggagggaccaaggtggagatcaaacgaactacg
acaaccccggcccccagaccaccaacgccagcccccaccatcgccagccaacccctgtctctgagaccagaagcctgtagg
cctgccgccggtggagctgtgcacacaagaggactggatttcgcctgtgatatctacatttgggccccgctcgcaggcaca
tgtggagtgctcctcctctccctggtgattaccctgtactgcaaaaggggccgcaaaaaactcctttacatttttaagcag
ccttttatgaggccagtacagacgactcaagaggaagacgggtgctcatgccgctttcctgaggaggaggaaggagggtgc
gaactgcgcgttaagttctcccgatcagccgacgcgcctgcttacaagcagggccagaaccaactgtacaacgagctgaat
ctcggtagacgggaagagtacgacgtgttggacaaacggagaggccgcgacccagaaatgggcggcaagcctcgcaggaaa
aacccccaggagggactgtacaatgagttgcagaaagataagatggcagaagcttatagcgagatcggaatgaagggggaa
aggagacgagggaaaggacacgacggcctttatcagggcctgtccacagcaacaaaagatacgtatgacgccctccatatg
caggcacttccaccacggtgataa
(amino acids)
(SEQ ID NO: 601)
QVQLVQSGAEVKKPGASVKVSCKASGYTFTDYAMNWVRQAPGQGLEWMGVISTFSGNTNFNQKFKGRVTMTTDTSTSTAY
MELRSLRSDDTAVYYCARSDYYGPYFDYWGQGTTLTVSSGGGGSGGGGSGGGGSDIVMTQTPLSLSVTPGQPASISCRSS
QTIVHSNGNTYLEWYLQKPGQSPQLLIYKVSNRFSGVPDRFSGSGSGTDFTLKISRVEAEDVGVYYCFQGSHVPFTFGGG
TKVEIKRTTTTPAPRPPTPAPTIASQPLSLRPEACRPAAGGAVHTRGLDFACDIYIWAPLAGTCGVLLLSLVITLYCKRG
RKKLLYIFKQPFMRPVQTTQEEDGCSCRFPEEEEGGCELRVKFSRSADAPAYKQGQNQLYNELNLGRREEYDVLDKRRGR
DPEMGGKPRRKNPQEGLYNELQKDKMAEAYSEIGMKGERRRGKGHDGLYQGLSTATKDTYDALHMQALPPR**
C3 CAR gBLOCK 1 sequence:
(DNA)
(SEQ ID NO: 602)
atccacgctgttttgacctccatagaagattctagagctagctgtagagcttggtaccgagggccaccatggccctgcccg
tgaccgctttgctgctccccctggcgctgctgctgcacgccgccaggccacaggttcagctggtgcagtctggagctgagg
tgaagaagcctggggcctcagtgaaggtctcctgcaaggcttctggttacacctttaccgactacgccatgaactgggtgc
gacaggcccctggacaagggcttgagtggatgggagtgatcagcaccttcagcggtaacacaaacttcaaccagaagttca
agggcagagtcaccatgaccacagacacatccacgagcacagcctacatggagctgaggagcctgagatctgacgacacgg
ccgtgtattactgtgcgagaagcgactactacggcccatacttcgactactggggccagggcaccaccctgaccgtgtcca
gcggcggtggcggatccggcggtggcggatccggcggtggcggatccgatattgtgatgacccagactccactctctctgt
C3 CAR gBLOCK 2 sequence:
(DNA)
(SEQ ID NO: 603)
tattgtgatgacccagactccactctctctgtccgtcacccctggacagccggcctccatctcctgcaggtctagtcagac
cattgtccatagtaatggaaacacctatttggagtggtacctgcagaagccaggccagtctccacagctcctgatctataa
ggtttccaaccggttctctggagtgccagataggttcagtggcagcgggtcagggacagatttcacactgaaaatcagccg
ggtggaggctgaggatgttggggtttattactgcttccaaggtagccacgtgcctttcaccttcggcggagggaccaaggt
ggagatcaaacgaactacgacaaccccggcccccagaccaccaacgccagcccccaccatcgccagccaacccctgtctct
gagaccagaagcctgtaggcctgccgccggtggagctgtgcacacaagaggactggatttcgcctgtgatatctacatttg
ggccccgctcgcaggcacatgtg
E6 scFV gBLOCK 1 sequence:
(DNA)
(SEQ ID NO: 604)
tgctctgggttccaggttccactggtgacgcggcccagccggccgaggtgcagctggtggagtctgggggaggcctggtca
agcctggggggtccctgagactctcctgtgcagcctctggattcaccttcagtaggtatggcatgagctgggtccgccagg
ctccagggaagaggctggagtgggtctcaaccattagtggcggaggcacctacatatactacccagactcagtgaagggcc
gattcaccatctccagagacaacgccaagaacaccctgtatctgcaaatgaacagcctgagagccgaggacacggctgtgt
attactgtaccagagataactatggccgcaactatgattatggcatggattattggggccagggcaccctggtgaccgtga
gcagcggcggtggcggatccggcggtggcggatccggcggtggcggatcc
E6 scFV gBLOCK 2 sequence:
(DNA)
(SEQ ID NO: 605)
ggcggtggcggatccggcggtggcggatccggcggtggcggatccgaaattgtgttgacacagtctccagccaccctgtct
ttgtctccaggggaaagagccaccctcacctgcagcgccaccagcagtgttagctacatccactggtaccaacagaggcct
ggccagagccccaggctcctcatctatagcacctccaacctggccagcggcatcccagccaggttcagtggcagtgggtct
gggagcgactacactctcaccatcagcagcctagagcctgaagattttgcagtttattactgtcagcagcgtagcagctcc
cctttcacctttggcagcggcaccaaagtggaaattaaaaccggtcatcatcaccatcaccactgataagtttaaacccgc
tgatcagcctcgactgtgccttctagt
CAR-T C2 CD8/CD8/CD3z sequence:
N-CD8ls-huMNC2scFv-CD8ecd fragment- CD8 transmembrane- CD3zeta-C
(DNA)
(SEQ ID NO: 606)
atggccttgccagtgacggccctgctgctgccattggctcttctgttgcacgctgccaggcctgaagtgcagctcgtagag
agtggcgggggactggtgaagcccggtggaagcctcagactcagttgcgccgcctcaggtttcactttttcaggttacgcc
atgtcctgggtaagacaggcaccggggaaaggactcgagtgggtgtctactatcagctcaggaggcacttatatatattat
cctgactctgtaaaaggccgatttacgatttctcgcgacaatgcaaagaactccctctacctccaaatgaacagtcttagg
gcagaagacactgctgtatactattgtgcacgcctcggcggcgacaactactacgagtactttgacgtgtgggggaaaggg
actaccgtgacagtttcaagcggaggaggtggctcaggtggaggcgggtcaggggggggaggaagtgatattgtgctcaca
caatccccagcctccctggctgtgtctcccggccaacgcgctacaattacatgtcgggcctccaaaagcgtgagcaccagc
ggctacagctacatgcactggtatcaacagaaaccaggacaaccccccaaactgttgatttatctcgcttcaaacttggag
tccggcgtgcctgcgcgcttttcagggagtgggagcggcacagattttacgctgactatcaaccccgtagaagcaaacgat
acagcgaattattattgtcaacattcccgggaactcccctttacgttcggcgggggcacaaaggtcgaaattaagagaacc
acgacaaccccggcccccagaccaccaacgccagcccccaccatcgccagccaacccctgtctctgagaccagaagcctgt
aggcctgccgccggtggagctgtgcacacaagaggactggatttcgcctgtgatatctacatttgggccccgctcgcaggc
acatgtggagtgctcctcctctccctggtgattaccctgtactgccgcgttaagttctcccgatcagccgacgcgcctgct
tacaagcagggccagaaccaactgtacaacgagctgaatctcggtagacgggaagagtacgacgtgttggacaaacggaga
ggccgcgacccagaaatgggcggcaagcctcgcaggaaaaacccccaggagggactgtacaatgagttgcagaaagataag
atggcagaagcttatagcgagatcggaatgaagggggaaaggagacgagggaaaggacacgacggcctttatcagggcctg
tccacagcaacaaaagatacgtatgacgccctccatatgcaggcacttccaccacggtgataa
(amino acids)
(SEQ ID NO: 607)
MALPVTALLLPLALLLHAARPEVQLVESGGGLVKPGGSLRLSCAASGFTFSGYAMSWVRQAPGKGLEWVSTISSGGTYIY
YPDSVKGRFTISRDNAKNSLYLQMNSLRAEDTAVYYCARLGGDNYYEYFDVWGKGTTVTVSSGGGGSGGGGSGGGGSDIV
LTQSPASLAVSPGQRATITCRASKSVSTSGYSYMHWYQQKPGQPPKLLIYLASNLESGVPARFSGSGSGTDFTLTINPVE
ANDTANYYCQHSRELPFTFGGGTKVEIKRTTTTPAPRPPTPAPTIASQPLSLRPEACRPAAGGAVHTRGLDFACDIYIWA
PLAGTCGVLLLSLVITLYCRVKFSRSADAPAYKQGQNQLYNELNLGRREEYDVLDKRRGRDPEMGGKPRRKNPQEGLYNE
LQKDKMAEAYSEIGMKGERRRGKGHDGLYQGLSTATKDTYDALHMQALPPR**
CAR-T C2 CD8/CD8/CD28/CD3z sequence:
N-CD8ls-huMNC2scFv-CD8ecd fragment- CD8 transmembrane- CD28- CD3zeta-C
(DNA)
(SEQ ID NO: 608)
atggccttgccagtgacggccctgctgctgccattggctcttctgttgcacgctgccaggcctgaagtgcagctcgtagag
agtggcgggggactggtgaagcccggtggaagcctcagactcagttgcgccgcctcaggtttcactttttcaggttacgcc
atgtcctgggtaagacaggcaccggggaaaggactcgagtgggtgtctactatcagctcaggaggcacttatatatattat
cctgactctgtaaaaggccgatttacgatttctcgcgacaatgcaaagaactccctctacctccaaatgaacagtcttagg
gcagaagacactgctgtatactattgtgcacgcctcggcggcgacaactactacgagtactttgacgtgtgggggaaaggg
actaccgtgacagtttcaagcggaggaggtggctcaggtggaggcgggtcaggggggggaggaagtgatattgtgctcaca
caatccccagcctccctggctgtgtctcccggccaacgcgctacaattacatgtcgggcctccaaaagcgtgagcaccagc
ggctacagctacatgcactggtatcaacagaaaccaggacaaccccccaaactgttgatttatctcgcttcaaacttggag
tccggcgtgcctgcgcgcttttcagggagtgggagcggcacagattttacgctgactatcaaccccgtagaagcaaacgat
acagcgaattattattgtcaacattcccgggaactcccctttacgttcggcgggggcacaaaggtcgaaattaagagaacc
acgacaaccccggcccccagaccaccaacgccagcccccaccatcgccagccaacccctgtctctgagaccagaagcctgt
aggcctgccgccggtggagctgtgcacacaagaggactggatttcgcctgtgatatctacatttgggccccgctcgcaggc
acatgtggagtgctcctcctctccctggtgattaccctgtactgcagaagcaagcggtctcggctcctgcattctgattac
atgaacatgaccccaagaagaccaggccccaccaggaaacattaccagccctacgctccgccacgcgacttcgctgcctac
cggtcccgcgttaagttctcccgatcagccgacgcgcctgcttacaagcagggccagaaccaactgtacaacgagctgaat
ctcggtagacgggaagagtacgacgtgttggacaaacggagaggccgcgacccagaaatgggcggcaagcctcgcaggaaa
aacccccaggagggactgtacaatgagttgcagaaagataagatggcagaagcttatagcgagatcggaatgaagggggaa
aggagacgagggaaaggacacgacggcctttatcagggcctgtccacagcaacaaaagatacgtatgacgccctccatatg
caggcacttccaccacggtgataa
(amino acids)
(SEQ ID NO: 609)
MALPVTALLLPLALLLHAARPEVQLVESGGGLVKPGGSLRLSCAASGFTFSGYAMSWVRQAPGKGLEWVSTISSGGTYIY
YPDSVKGRFTISRDNAKNSLYLQMNSLRAEDTAVYYCARLGGDNYYEYFDVWGKGTTVTVSSGGGGSGGGGSGGGGSDIV
LTQSPASLAVSPGQRATITCRASKSVSTSGYSYMHWYQQKPGQPPKLLIYLASNLESGVPARFSGSGSGTDFTLTINPVE
ANDTANYYCQHSRELPFTFGGGTKVEIKRTTTTPAPRPPTPAPTIASQPLSLRPEACRPAAGGAVHTRGLDFACDIYIWA
PLAGTCGVLLLSLVITLYCRSKRSRLLHSDYMNMTPRRPGPTRKHYQPYAPPRDFAAYRSRVKFSRSADAPAYKQGQNQL
YNELNLGRREEYDVLDKRRGRDPEMGGKPRRKNPQEGLYNELQKDKMAEAYSEIGMKGERRRGKGHDGLYQGLSTATKDT
YDALHMQALPPR**
CAR-T C2 CD8/CD8/4-1BB/CD3z sequence #13:
N-CD8ls-huMNC2scFv-CD8ecd fragment- CD8 transmembrane- 4-1BB- CD3zeta-C
(DNA)
(SEQ ID NO: 610)
atggccttgccagtgacggccctgctgctgccattggctcttctgttgcacgctgccaggcctgaagtgcagctcgtagag
agtggcgggggactggtgaagcccggtggaagcctcagactcagttgcgccgcctcaggtttcactttttcaggttacgcc
atgtcctgggtaagacaggcaccggggaaaggactcgagtgggtgtctactatcagctcaggaggcacttatatatattat
cctgactctgtaaaaggccgatttacgatttctcgcgacaatgcaaagaactccctctacctccaaatgaacagtcttagg
gcagaagacactgctgtatactattgtgcacgcctcggcggcgacaactactacgagtactttgacgtgtgggggaaaggg
actaccgtgacagtttcaagcggaggaggtggctcaggtggaggcgggtcaggggggggaggaagtgatattgtgctcaca
caatccccagcctccctggctgtgtctcccggccaacgcgctacaattacatgtcgggcctccaaaagcgtgagcaccagc
ggctacagctacatgcactggtatcaacagaaaccaggacaaccccccaaactgttgatttatctcgcttcaaacttggag
tccggcgtgcctgcgcgcttttcagggagtgggagcggcacagattttacgctgactatcaaccccgtagaagcaaacgat
acagcgaattattattgtcaacattcccgggaactcccctttacgttcggcgggggcacaaaggtcgaaattaagagaacc
acgacaaccccggcccccagaccaccaacgccagcccccaccatcgccagccaacccctgtctctgagaccagaagcctgt
aggcctgccgccggtggagctgtgcacacaagaggactggatttcgcctgtgatatctacatttgggccccgctcgcaggc
acatgtggagtgctcctcctctccctggtgattaccctgtactgcaaaaggggccgcaaaaaactcctttacatttttaag
cagccttttatgaggccagtacagacgactcaagaggaagacgggtgctcatgccgctttcctgaggaggaggaaggaggg
tgcgaactgcgcgttaagttctcccgatcagccgacgcgcctgcttacaagcagggccagaaccaactgtacaacgagctg
aatctcggtagacgggaagagtacgacgtgttggacaaacggagaggccgcgacccagaaatgggcggcaagcctcgcagg
aaaaacccccaggagggactgtacaatgagttgcagaaagataagatggcagaagcttatagcgagatcggaatgaagggg
gaaaggagacgagggaaaggacacgacggcctttatcagggcctgtccacagcaacaaaagatacgtatgacgccctccat
atgcaggcacttccaccacggtgataa
(amino acids)
(SEQ ID NO: 611)
MALPVTALLLPLALLLHAARPEVQLVESGGGLVKPGGSLRLSCAASGFTFSGYAMSWVRQAPGKGLEWVSTISSGGTYIY
YPDSVKGRFTISRDNAKNSLYLQMNSLRAEDTAVYYCARLGGDNYYEYFDVWGKGTTVTVSSGGGGSGGGGSGGGGSDIV
LTQSPASLAVSPGQRATITCRASKSVSTSGYSYMHWYQQKPGQPPKLLIYLASNLESGVPARFSGSGSGTDFTLTINPVE
ANDTANYYCQHSRELPFTFGGGTKVEIKRTTTTPAPRPPTPAPTIASQPLSLRPEACRPAAGGAVHTRGLDFACDIYIWA
PLAGTCGVLLLSLVITLYCKRGRKKLLYIFKQPFMRPVQTTQEEDGCSCRFPEEEEGGCELRVKFSRSADAPAYKQGQNQ
LYNELNLGRREEYDVLDKRRGRDPEMGGKPRRKNPQEGLYNELQKDKMAEAYSEIGMKGERRRGKGHDGLYQGLSTATKD
TYDALHMQALPPR**
CAR-T C2 CD8/CD8/OX40/CD3z sequence:
N-CD8ls-huMNC2scFv-CD8ecd fragment- CD8 transmembrane- OX40- CD3zeta-C
(DNA)
(SEQ ID NO: 612)
atggccttgccagtgacggccctgctgctgccattggctcttctgttgcacgctgccaggcctgaagtgcagctcgtagag
agtggcgggggactggtgaagcccggtggaagcctcagactcagttgcgccgcctcaggtttcactttttcaggttacgcc
atgtcctgggtaagacaggcaccggggaaaggactcgagtgggtgtctactatcagctcaggaggcacttatatatattat
cctgactctgtaaaaggccgatttacgatttctcgcgacaatgcaaagaactccctctacctccaaatgaacagtcttagg
gcagaagacactgctgtatactattgtgcacgcctcggcggcgacaactactacgagtactttgacgtgtgggggaaaggg
actaccgtgacagtttcaagcggaggaggtggctcaggtggaggcgggtcaggggggggaggaagtgatattgtgctcaca
caatccccagcctccctggctgtgtctcccggccaacgcgctacaattacatgtcgggcctccaaaagcgtgagcaccagc
ggctacagctacatgcactggtatcaacagaaaccaggacaaccccccaaactgttgatttatctcgcttcaaacttggag
tccggcgtgcctgcgcgcttttcagggagtgggagcggcacagattttacgctgactatcaaccccgtagaagcaaacgat
acagcgaattattattgtcaacattcccgggaactcccctttacgttcggcgggggcacaaaggtcgaaattaagagaacc
acgacaaccccggcccccagaccaccaacgccagcccccaccatcgccagccaacccctgtctctgagaccagaagcctgt
aggcctgccgccggtggagctgtgcacacaagaggactggatttcgcctgtgatatctacatttgggccccgctcgcaggc
acatgtggagtgctcctcctctccctggtgattaccctgtactgccggagggaccagaggctgccccccgatgcccacaag
ccccctgggggaggcagtttccggacccccatccaagaggagcaggccgacgcccactccaccctggccaagatccgcgtt
aagttctcccgatcagccgacgcgcctgcttacaagcagggccagaaccaactgtacaacgagctgaatctcggtagacgg
gaagagtacgacgtgttggacaaacggagaggccgcgacccagaaatgggcggcaagcctcgcaggaaaaacccccaggag
ggactgtacaatgagttgcagaaagataagatggcagaagcttatagcgagatcggaatgaagggggaaaggagacgaggg
aaaggacacgacggcctttatcagggcctgtccacagcaacaaaagatacgtatgacgccctccatatgcaggcacttcca
ccacggtgataa
(amino acids)
(SEQ ID NO: 613)
MALPVTALLLPLALLLHAARPEVQLVESGGGLVKPGGSLRLSCAASGFTFSGYAMSWVRQAPGKGLEWVSTISSGGTYIY
YPDSVKGRFTISRDNAKNSLYLQMNSLRAEDTAVYYCARLGGDNYYEYFDVWGKGTTVTVSSGGGGSGGGGSGGGGSDIV
LTQSPASLAVSPGQRATITCRASKSVSTSGYSYMHWYQQKPGQPPKLLIYLASNLESGVPARFSGSGSGTDFTLTINPVE
ANDTANYYCQHSRELPFTFGGGTKVEIKRTTTTPAPRPPTPAPTIASQPLSLRPEACRPAAGGAVHTRGLDFACDIYIWA
PLAGTCGVLLLSLVITLYCRRDQRLPPDAHKPPGGGSFRTPIQEEQADAHSTLAKIRVKFSRSADAPAYKQGQNQLYNEL
NLGRREEYDVLDKRRGRDPEMGGKPRRKNPQEGLYNELQKDKMAEAYSEIGMKGERRRGKGHDGLYQGLSTATKDTYDAL
HMQALPPR**
CAR-T C2 CD8/CD8/CD28/OX40/CD3z sequence:
N-CD8ls-huMNC2scFv-CD8ecd fragment- CD8 transmembrane- CD28- OX40- CD3zeta-C
(DNA)
(SEQ ID NO: 614)
atggccttgccagtgacggccctgctgctgccattggctcttctgttgcacgctgccaggcctgaagtgcagctcgtagag
agtggcgggggactggtgaagcccggtggaagcctcagactcagttgcgccgcctcaggtttcactttttcaggttacgcc
atgtcctgggtaagacaggcaccggggaaaggactcgagtgggtgtctactatcagctcaggaggcacttatatatattat
cctgactctgtaaaaggccgatttacgatttctcgcgacaatgcaaagaactccctctacctccaaatgaacagtcttagg
gcagaagacactgctgtatactattgtgcacgcctcggcggcgacaactactacgagtactttgacgtgtgggggaaaggg
actaccgtgacagtttcaagcggaggaggtggctcaggtggaggcgggtcaggggggggaggaagtgatattgtgctcaca
caatccccagcctccctggctgtgtctcccggccaacgcgctacaattacatgtcgggcctccaaaagcgtgagcaccagc
ggctacagctacatgcactggtatcaacagaaaccaggacaaccccccaaactgttgatttatctcgcttcaaacttggag
tccggcgtgcctgcgcgcttttcagggagtgggagcggcacagattttacgctgactatcaaccccgtagaagcaaacgat
acagcgaattattattgtcaacattcccgggaactcccctttacgttcggcgggggcacaaaggtcgaaattaagagaacc
acgacaaccccggcccccagaccaccaacgccagcccccaccatcgccagccaacccctgtctctgagaccagaagcctgt
aggcctgccgccggtggagctgtgcacacaagaggactggatttcgcctgtgatatctacatttgggccccgctcgcaggc
acatgtggagtgctcctcctctccctggtgattaccctgtactgcagaagcaagcggtctcggctcctgcattctgattac
atgaacatgaccccaagaagaccaggccccaccaggaaacattaccagccctacgctccgccacgcgacttcgctgcctac
cggtcccggagggaccagaggctgccccccgatgcccacaagccccctgggggaggcagtttccggacccccatccaagag
gagcaggccgacgcccactccaccctggccaagatccgcgttaagttctcccgatcagccgacgcgcctgcttacaagcag
ggccagaaccaactgtacaacgagctgaatctcggtagacgggaagagtacgacgtgttggacaaacggagaggccgcgac
ccagaaatgggcggcaagcctcgcaggaaaaacccccaggagggactgtacaatgagttgcagaaagataagatggcagaa
gcttatagcgagatcggaatgaagggggaaaggagacgagggaaaggacacgacggcctttatcagggcctgtccacagca
acaaaagatacgtatgacgccctccatatgcaggcacttccaccacggtgataa
(amino acids)
(SEQ ID NO: 615)
MALPVTALLLPLALLLHAARPEVQLVESGGGLVKPGGSLRLSCAASGFTFSGYAMSWVRQAPGKGLEWVSTISSGGTYIY
YPDSVKGRFTISRDNAKNSLYLQMNSLRAEDTAVYYCARLGGDNYYEYFDVWGKGTTVTVSSGGGGSGGGGSGGGGSDIV
LTQSPASLAVSPGQRATITCRASKSVSTSGYSYMHWYQQKPGQPPKLLIYLASNLESGVPARFSGSGSGTDFTLTINPVE
ANDTANYYCQHSRELPFTFGGGTKVEIKRTTTTPAPRPPTPAPTIASQPLSLRPEACRPAAGGAVHTRGLDFACDIYIWA
PLAGTCGVLLLSLVITLYCRSKRSRLLHSDYMNMTPRRPGPTRKHYQPYAPPRDFAAYRSRRDQRLPPDAHKPPGGGSFR
TPIQEEQADAHSTLAKIRVKFSRSADAPAYKQGQNQLYNELNLGRREEYDVLDKRRGRDPEMGGKPRRKNPQEGLYNELQ
KDKMAEAYSEIGMKGERRRGKGHDGLYQGLSTATKDTYDALHMQALPPR**
CAR-T E6 CD8/CD8/OX40/CD3z sequence:
N-CD8ls-huMNE6scFv-CD8ecd fragment- CD8 transmembrane- OX40- CD3zeta-C
(DNA)
(SEQ ID NO: 616)
atggccctgcccgtgaccgctttgctgctccccctggcgctgctgctgcacgccgccaggccagaggtccagctggttgag
agtggcggtgggctggttaagcctggcggctccctgcggctgagctgcgccgcgagtggatttactttcagccgatatggg
atgagttgggtgcggcaagctcccgggaagaggctggaatgggtctcaacaatctccggggggggcacttacatctattac
cccgactcagtcaaggggagatttaccatttcacgagacaacgctaagaataccctgtatttgcagatgaattctctgaga
gcagaggacacagctgtttactattgtacccgcgacaactatggcaggaactacgactacggtatggactattggggacaa
gggacattggttacagtgagcagtggcggcgggggcagcggaggaggaggcagcggtggggggggcagcgagatagtgctc
acgcagtcacccgcgactctcagtctctcacctggggaacgagctaccctgacgtgctctgctacctcctcagtgtcatat
attcactggtatcagcaacggcccgggcagtcccctagattgctcatttatagtacctctaatctggcctcaggtatccct
gcacgattttctggatctggttcaggttctgattacaccctcactatctctagcctggagcctgaagactttgccgtttat
tactgccagcagaggtctagctccccattcacctttgggagtgggaccaaggttgaaattaaaacgacaaccccggccccc
agaccaccaacgccagcccccaccatcgccagccaacccctgtctctgagaccagaagcctgtaggcctgccgccggtgga
gctgtgcacacaagaggactggatttcgcctgtgatatctacatttgggccccgctcgcaggcacatgtggagtgctcctc
ctctccctggtgattaccctgtactgccggagggaccagaggctgccccccgatgcccacaagccccctgggggaggcagt
ttccggacccccatccaagaggagcaggccgacgcccactccaccctggccaagatccgcgttaagttctcccgatcagcc
gacgcgcctgcttacaagcagggccagaaccaactgtacaacgagctgaatctcggtagacgggaagagtacgacgtgttg
gacaaacggagaggccgcgacccagaaatgggcggcaagcctcgcaggaaaaacccccaggagggactgtacaatgagttg
cagaaagataagatggcagaagcttatagcgagatcggaatgaagggggaaaggagacgagggaaaggacacgacggcctt
tatcagggcctgtccacagcaacaaaagatacgtatgacgccctccatatgcaggcacttccaccacggtgataa
(amino acids)
(SEQ ID NO: 617)
MALPVTALLLPLALLLHAARPEVQLVESGGGLVKPGGSLRLSCAASGFTFSRYGMSWVRQAPGKRLEWVSTISGGGTYIY
YPDSVKGRFTISRDNAKNTLYLQMNSLRAEDTAVYYCTRDNYGRNYDYGMDYWGQGTLVTVSSGGGGSGGGGSGGGGSEI
VLTQSPATLSLSPGERATLTCSATSSVSYIHWYQQRPGQSPRLLIYSTSNLASGIPARFSGSGSGSDYTLTISSLEPEDF
AVYYCQQRSSSPFTFGSGTKVEIKTTTPAPRPPTPAPTIASQPLSLRPEACRPAAGGAVHTRGLDFACDIYIWAPLAGTC
GVLLLSLVITLYCRRDQRLPPDAHKPPGGGSFRTPIQEEQADAHSTLAKIRVKFSRSADAPAYKQGQNQLYNELNLGRRE
EYDVLDKRRGRDPEMGGKPRRKNPQEGLYNELQKDKMAEAYSEIGMKGERRRGKGHDGLYQGLSTATKDTYDALHMQALP
PR**
CAR-T E6 CD8/CD8/CD28/OX40/CD3z sequence:
N-CD8ls-huMNC2scFv-CD8ecd fragment- CD8 transmembrane- CD28- OX40- CD3zeta-C
(DNA)
(SEQ ID NO: 618)
atggccctgcccgtgaccgctttgctgctccccctggcgctgctgctgcacgccgccaggccagaggtccagctggttgag
agtggcggtgggctggttaagcctggcggctccctgcggctgagctgcgccgcgagtggatttactttcagccgatatggg
atgagttgggtgcggcaagctcccgggaagaggctggaatgggtctcaacaatctccggggggggcacttacatctattac
cccgactcagtcaaggggagatttaccatttcacgagacaacgctaagaataccctgtatttgcagatgaattctctgaga
gcagaggacacagctgtttactattgtacccgcgacaactatggcaggaactacgactacggtatggactattggggacaa
gggacattggttacagtgagcagtggcggcgggggcagcggaggaggaggcagcggtggggggggcagcgagatagtgctc
acgcagtcacccgcgactctcagtctctcacctggggaacgagctaccctgacgtgctctgctacctcctcagtgtcatat
attcactggtatcagcaacggcccgggcagtcccctagattgctcatttatagtacctctaatctggcctcaggtatccct
gcacgattttctggatctggttcaggttctgattacaccctcactatctctagcctggagcctgaagactttgccgtttat
tactgccagcagaggtctagctccccattcacctttgggagtgggaccaaggttgaaattaaaacgacaaccccggccccc
agaccaccaacgccagcccccaccatcgccagccaacccctgtctctgagaccagaagcctgtaggcctgccgccggtgga
gctgtgcacacaagaggactggatttcgcctgtgatatctacatttgggccccgctcgcaggcacatgtggagtgctcctc
ctctccctggtgattaccctgtactgcagaagcaagcggtctcggctcctgcattctgattacatgaacatgaccccaaga
agaccaggccccaccaggaaacattaccagccctacgctccgccacgcgacttcgctgcctaccggtcccggagggaccag
aggctgccccccgatgcccacaagccccctgggggaggcagtttccggacccccatccaagaggagcaggccgacgcccac
tccaccctggccaagatccgcgttaagttctcccgatcagccgacgcgcctgcttacaagcagggccagaaccaactgtac
aacgagctgaatctcggtagacgggaagagtacgacgtgttggacaaacggagaggccgcgacccagaaatgggcggcaag
cctcgcaggaaaaacccccaggagggactgtacaatgagttgcagaaagataagatggcagaagcttatagcgagatcgga
atgaagggggaaaggagacgagggaaaggacacgacggcctttatcagggcctgtccacagcaacaaaagatacgtatgac
gccctccatatgcaggcacttccaccacggtgataa
(amino acids)
(SEQ ID NO: 619)
MALPVTALLLPLALLLHAARPEVQLVESGGGLVKPGGSLRLSCAASGFTFSRYGMSWVRQAPGKRLEWVSTISGGGTYIY
YPDSVKGRFTISRDNAKNTLYLQMNSLRAEDTAVYYCTRDNYGRNYDYGMDYWGQGTLVTVSSGGGGSGGGGSGGGGSEI
VLTQSPATLSLSPGERATLTCSATSSVSYIHWYQQRPGQSPRLLIYSTSNLASGIPARFSGSGSGSDYTLTISSLEPEDF
AVYYCQQRSSSPFTFGSGTKVEIKTTTPAPRPPTPAPTIASQPLSLRPEACRPAAGGAVHTRGLDFACDIYIWAPLAGTC
GVLLLSLVITLYCRSKRSRLLHSDYMNMTPRRPGPTRKHYQPYAPPRDFAAYRSRRDQRLPPDAHKPPGGGSFRTPIQEE
QADAHSTLAKIRVKFSRSADAPAYKQGQNQLYNELNLGRREEYDVLDKRRGRDPEMGGKPRRKNPQEGLYNELQKDKMAE
AYSEIGMKGERRRGKGHDGLYQGLSTATKDTYDALHMQALPPR**
MUC1 truncated cytoplasmic sequence
(amino acids)
(SEQ ID NO: 620)
SNIKFRPGSVVVQLTLAFREGTINVHDVETQFNQYKTEAASRY
MUC1 truncated cytoplasmic sequence
(amino acids)
(SEQ ID NO: 621)
SVVVQLTLAFREGTINVHDVETQFNQYKTEAASRY
MUC1 truncated cytoplasmic sequence
(amino acids)
(SEQ ID NO: 622)
VQLTLAFREGTINVHDVETQFNQY
MUC1 truncated cytoplasmic sequence
(amino acids)
(SEQ ID NO: 623)
SNIKFRPGSVVVQLTLAFREGTIN
Primers
(SEQ ID NO: 624)
attctaagcttgggccaccatggaactg
(SEQ ID NO: 625)
tctagagtttaaacttactatttacccggagacagggagag
(SEQ ID NO: 626)
agtatggcccagccggccgaggtgcagctggtggagtctgg
(SEQ ID NO: 627)
tagaaggcacagtcgaggctgatcag
(SEQ ID NO: 628)
attctaagcttgggccaccatggaagc
(SEQ ID NO: 629)
tctagagtttaaacttactaacactctcccctgttgaagc
(SEQ ID NO: 630)
agtatggcccagccggccgaaattgtgttgacacagtctccag
(SEQ ID NO: 631)
tagaaggcacagtcgaggctgatcag
(SEQ ID NO: 632)
actgtcatatggaggtgcagctggtggagtctg
(SEQ ID NO: 633)
actgtctcgagtttaatttccactttggtgccgctgc
(SEQ ID NO: 634)
actgtcatatggaggtgcagctggtggagtctg
(SEQ ID NO: 635)
actgtaccggttttaatttccactttggtgccgctgc
(SEQ ID NO: 636)
cttcttcctcaggagcaagctcaccgtgg
(SEQ ID NO: 637)
gagccgtcggagtccagc
(SEQ ID NO: 638)
gcacctgaactcctgggg
(SEQ ID NO: 639)
tttaatttccactttggtgccg
(SEQ ID NO: 640)
cgcggctagcttaagcttggtaccgagggcca
(SEQ ID NO: 641)
cgcggcggccgcctgatcagcgggtttaaacttatc
MMP9
(DNA)
(SEQ ID NO: 642)
atgagcctctggcagcccctggtcctggtgctcctggtgctgggctgctgctttgctgcccccagacagcgccagtccacc
cttgtgctcttccctggagacctgagaaccaatctcaccgacaggcagctggcagaggaatacctgtaccgctatggttac
actcgggtggcagagatgcgtggagagtcgaaatctctggggcctgcgctgctgcttctccagaagcaactgtccctgccc
gagaccggtgagctggatagcgccacgctgaaggccatgcgaaccccacggtgcggggtcccagacctgggcagattccaa
acctttgagggcgacctcaagtggcaccaccacaacatcacctattggatccaaaactactcggaagacttgccgcgggcg
gtgattgacgacgcctttgcccgcgccttcgcactgtggagcgcggtgacgccgctcaccttcactcgcgtgtacagccgg
gacgcagacatcgtcatccagtttggtgtcgcggagcacggagacgggtatcccttcgacgggaaggacgggctcctggca
cacgcctttcctcctggccccggcattcagggagacgcccatttcgacgatgacgagttgtggtccctgggcaagggcgtc
gtggttccaactcggtttggaaacgcagatggcgcggcctgccacttccccttcatcttcgagggccgctcctactctgcc
tgcaccaccgacggtcgctccgacggcttgccctggtgcagtaccacggccaactacgacaccgacgaccggtttggcttc
tgccccagcgagagactctacacccaggacggcaatgctgatgggaaaccctgccagtttccattcatcttccaaggccaa
tcctactccgcctgcaccacggacggtcgctccgacggctaccgctggtgcgccaccaccgccaactacgaccgggacaag
ctcttcggcttctgcccgacccgagctgactcgacggtgatggggggcaactcggcgggggagctgtgcgtcttccccttc
actttcctgggtaaggagtactcgacctgtaccagcgagggccgcggagatgggcgcctctggtgcgctaccacctcgaac
tttgacagcgacaagaagtggggcttctgcccggaccaaggatacagtttgttcctcgtggcggcgcatgagttcggccac
gcgctgggcttagatcattcctcagtgccggaggcgctcatgtaccctatgtaccgcttcactgaggggccccccttgcat
aaggacgacgtgaatggcatccggcacctctatggtcctcgccctgaacctgagccacggcctccaaccaccaccacaccg
cagcccacggctcccccgacggtctgccccaccggaccccccactgtccacccctcagagcgccccacagctggccccaca
ggtcccccctcagctggccccacaggtccccccactgctggcccttctacggccactactgtgcctttgagtccggtggac
gatgcctgcaacgtgaacatcttcgacgccatcgcggagattgggaaccagctgtatttgttcaaggatgggaagtactgg
cgattctctgagggcagggggagccggccgcagggccccttccttatcgccgacaagtggcccgcgctgccccgcaagctg
gactcggtctttgaggagcggctctccaagaagcttttcttcttctctgggcgccaggtgtgggtgtacacaggcgcgtcg
gtgctgggcccgaggcgtctggacaagctgggcctgggagccgacgtggcccaggtgaccggggccctccggagtggcagg
gggaagatgctgctgttcagcgggcggcgcctctggaggttcgacgtgaaggcgcagatggtggatccccggagcgccagc
gaggtggaccggatgttccccggggtgcctttggacacgcacgacgtcttccagtaccgagagaaagcctatttctgccag
gaccgcttctactggcgcgtgagttcccggagtgagttgaaccaggtggaccaagtgggctacgtgacctatgacatcctg
cagtgccctgaggacgattacaaggatgacgacgataagtgataa
(amino acids)
(SEQ ID NO: 643)
MSLWQPLVLVLLVLGCCFAAPRQRQSTLVLFPGDLRTNLTDRQLAEEYLYRYGYTRVAEMRGESKSLGPALLLLQKQLSL
PETGELDSATLKAMRTPRCGVPDLGRFQTFEGDLKWHHHNITYWIQNYSEDLPRAVIDDAFARAFALWSAVTPLTFTRVY
SRDADIVIQFGVAEHGDGYPFDGKDGLLAHAFPPGPGIQGDAHFDDDELWSLGKGVVVPTRFGNADGAACHFPFIFEGRS
YSACTTDGRSDGLPWCSTTANYDTDDRFGFCPSERLYTQDGNADGKPCQFPFIFQGQSYSACTTDGRSDGYRWCATTANY
DRDKLFGFCPTRADSTVMGGNSAGELCVFPFTFLGKEYSTCTSEGRGDGRLWCATTSNFDSDKKWGFCPDQGYSLFLVAA
HEFGHALGLDHSSVPEALMYPMYRFTEGPPLHKDDVNGIRHLYGPRPEPEPRPPTTTTPQPTAPPTVCPTGPPTVHPSER
PTAGPTGPPSAGPTGPPTAGPSTATTVPLSPVDDACNVNIFDAIAEIGNQLYLFKDGKYWRFSEGRGSRPQGPFLIADKW
PALPRKLDSVFEERLSKKLFFFSGRQVWVYTGASVLGPRRLDKLGLGADVAQVTGALRSGRGKMLLFSGRRLWRFDVKAQ
MVDPRSASEVDRMFPGVPLDTHDVFQYREKAYFCQDRFYWRVSSRSELNQVDQVGYVTYDILQCPEDDYKDDDDK**
MMP9 catalytic domain
(DNA)
(SEQ ID NO: 644)
atgttccaaacctttgagggcgacctcaagtggcaccaccacaacatcacctattggatccaaaactactcggaagacttg
ccgcgggcggtgattgacgacgcctttgcccgcgccttcgcactgtggagcgcggtgacgccgctcaccttcactcgcgtg
tacagccgggacgcagacatcgtcatccagtttggtgtcgcggagcacggagacgggtatcccttcgacgggaaggacggg
ctcctggcacacgcctttcctcctggccccggcattcagggagacgcccatttcgacgatgacgagttgtggtccctgggc
aagggcgtcgtggttccaactcggtttggaaacgcagatggcgcggcctgccacttccccttcatcttcgagggccgctcc
tactctgcctgcaccaccgacggtcgctccgacggcttgccctggtgcagtaccacggccaactacgacaccgacgaccgg
tttggcttctgccccagcgagagactctacacccaggacggcaatgctgatgggaaaccctgccagtttccattcatcttc
caaggccaatcctactccgcctgcaccacggacggtcgctccgacggctaccgctggtgcgccaccaccgccaactacgac
cgggacaagctcttcggcttctgcccgacccgagctgactcgacggtgatggggggcaactcggcgggggagctgtgcgtc
ttccccttcactttcctgggtaaggagtactcgacctgtaccagcgagggccgcggagatgggcgcctctggtgcgctacc
acctcgaactttgacagcgacaagaagtggggcttctgcccggaccaaggatacagtttgttcctcgtggcggcgcatgag
ttcggccacgcgctgggcttagatcattcctcagtgccggaggcgctcatgtaccctatgtaccgcttcactgaggggccc
cccttgcataaggacgacgtgaatggcatccggcacctctatggtcctcgccctgaacctgattacaaggatgacgacgat
aagtgataa
(amino acids)
(SEQ ID NO: 645)
MFQTFEGDLKWHHHNITYWIQNYSEDLPRAVIDDAFARAFALWSAVTPLTFTRVYSRDADIVIQFGVAEHGDGYPFDGKD
GLLAHAFPPGPGIQGDAHFDDDELWSLGKGVVVPTRFGNADGAACHFPFIFEGRSYSACTTDGRSDGLPWCSTTANYDTD
DRFGFCPSERLYTQDGNADGKPCQFPFIFQGQSYSACTTDGRSDGYRWCATTANYDRDKLFGFCPTRADSTVMGGNSAGE
LCVFPFTFLGKEYSTCTSEGRGDGRLWCATTSNFDSDKKWGFCPDQGYSLFLVAAHEFGHALGLDHSSVPEALMYPMYRF
TEGPPLHKDDVNGIRHLYGPRPEPDYKDDDDK**
NFATc1 Promoter (NFATc1P)
(DNA)
(SEQ ID NO: 646)
aggcaggaggaagaggaaaggggcgcagggcgctcggggagcagagccgggggcccgcggtggccgcagaggccgggccgg
ggcgcagaggccgggcgagctggccgcgctctgggccgccgcctccggaactccctgcgcctggcgcgcggccaccgtgg
tcccggcaacggcattaaacagagggaaacagacccgggattccgtcacccgggcggggggataaggacggctttgagag
cagacaggaaaagggagcttttctgcatggggtgaaaaaattatttattgaaggaggaggaggcggcagcggaggaaggg
gaggggcgggaggaggaggaagagccggccgcccccgccccggccccggctcctcaggagccaagggcagcctcgccagg
tcggtcccgggctcgaggaccgcggctggggtcgaggggctcagtctcccacgtgaccggctgggcgcgccccgccagac
ccggcctcgggattccctcctcccggcgagtctccgcccgccccgtcctggaggtggggagaaggagggcggggcggggg
ggacggaaactctccccgccaaatcctggccccaggcctggggacactcgcggcgggaagatttggaggggaggggaggg
ggaggggcgtgggggcgcggcctcgctggagtccccctgaccccccgacccccgcccaccggcctgggcgtcctcccgcg
gcccctcctcccctcccggcgcccggtgctctggggcgcgtgccacgcctggctcggcgccgtaggggcccccgcaggta
gagacccctggaaatggcctcgacgccgcaggagcgaggcggccaccaccccgctaatccgggcacgtctctccaggccg
aggcctgcggtggaaaagccggggttccatttgtgctgagtcggggcggccgaatggagccaggcctcgggacgcgggac
ggacgggctctggccgcgcaccttcgcgggctctgcagcgcccgaccgcctcccccggcagggaggaggcgcttgtgggg
ggcacccacggggcacagtgatccctgggggtctgcggacctcctgggccccgcagcagacacgagtttagcctttgggt
ttagtttaaatcacataagggtgtcgtgcaatcgatttatggtttctacacaccagacactttaacctccaacccccccc
atccaagccaacaagaaaatgcggtgccgtgttggcagctgagctgcgcccgaagagacgcagggagacgtaagagagga
aagtgtgagtggccggggggcctccccccgtcagaagtcgcgcagtcgcgcccataaaacgccccctccgggcggctagg
gcaggtgagcgcgtccccgggcctccccacgccggcccctgccacagagccgtctaggtcgagcagatatttacagaata
aaaatgacaataactcgacgtcccgggacggccacgcaatctgttagtaatttagcgggatgggaatttcctttctaggg
cctgccagtgaagcgcttttccaaatttccacagcgggggaagcctgcgattttacataatgacttcagcatgccgggct
ttctcgacacccctccccggcccccggcccccgccccccgccccttttccagcagggccgggctccctccggacacccgc
gtggactcaggcgtcccgtctggcccgttcgcccccgtttcccccgccagccccagcgcccccctgcccggcccccggat
tccccgttcccgcccctacgcccccatcccctccccgtgcgcccctccccgtgcgcccccctccccgtgcgccccccctc
cccgtgcgcccccctccccgtgcgccccccctccccgggcgcccccctccccgggcgccccccctccccgtgcgcccccc
cctccccgtgcgccccccctccccgtgcgcgccccgcctcttgcgcccctgcccccaggcgagcggctgccgcggcgcgg
ggaggggcgggcgctcggcgactcgtccccggggccccgcgcgggcccgggcagcaggggcgtgatgtcacggcagggag
ggggcgcgggagccgccgggccggcggggaggcgggggaggtgttttccagctttaaaaaggcaggaggcagagcgcggc
cctgcgtcagagcgagactcagagg
NFATc1P-MMP9
(DNA)
(SEQ ID NO: 647)
aggcaggaggaagaggaaaggggcgcagggcgctcggggagcagagccgggggcccgcggtggccgcagaggccgggccgg
ggcgcagaggccgggcgagctggccgcgctctgggccgccgcctccggaactccctgcgcctggcgcgcggccaccgtgg
tcccggcaacggcattaaacagagggaaacagacccgggattccgtcacccgggcggggggataaggacggctttgagag
cagacaggaaaagggagcttttctgcatggggtgaaaaaattatttattgaaggaggaggaggcggcagcggaggaaggg
gaggggcgggaggaggaggaagagccggccgcccccgccccggccccggctcctcaggagccaagggcagcctcgccagg
tcggtcccgggctcgaggaccgcggctggggtcgaggggctcagtctcccacgtgaccggctgggcgcgccccgccagac
ccggcctcgggattccctcctcccggcgagtctccgcccgccccgtcctggaggtggggagaaggagggcggggcggggg
ggacggaaactctccccgccaaatcctggccccaggcctggggacactcgcggcgggaagatttggaggggaggggaggg
ggaggggcgtgggggcgcggcctcgctggagtccccctgaccccccgacccccgcccaccggcctgggcgtcctcccgcg
gcccctcctcccctcccggcgcccggtgctctggggcgcgtgccacgcctggctcggcgccgtaggggcccccgcaggta
gagacccctggaaatggcctcgacgccgcaggagcgaggcggccaccaccccgctaatccgggcacgtctctccaggccg
aggcctgcggtggaaaagccggggttccatttgtgctgagtcggggcggccgaatggagccaggcctcgggacgcgggac
ggacgggctctggccgcgcaccttcgcgggctctgcagcgcccgaccgcctcccccggcagggaggaggcgcttgtgggg
ggcacccacggggcacagtgatccctgggggtctgcggacctcctgggccccgcagcagacacgagtttagcctttgggt
ttagtttaaatcacataagggtgtcgtgcaatcgatttatggtttctacacaccagacactttaacctccaacccccccc
atccaagccaacaagaaaatgcggtgccgtgttggcagctgagctgcgcccgaagagacgcagggagacgtaagagagga
aagtgtgagtggccggggggcctccccccgtcagaagtcgcgcagtcgcgcccataaaacgccccctccgggcggctagg
gcaggtgagcgcgtccccgggcctccccacgccggcccctgccacagagccgtctaggtcgagcagatatttacagaata
aaaatgacaataactcgacgtcccgggacggccacgcaatctgttagtaatttagcgggatgggaatttcctttctaggg
cctgccagtgaagcgcttttccaaatttccacagcgggggaagcctgcgattttacataatgacttcagcatgccgggct
ttctcgacacccctccccggcccccggcccccgccccccgccccttttccagcagggccgggctccctccggacacccgc
gtggactcaggcgtcccgtctggcccgttcgcccccgtttcccccgccagccccagcgcccccctgcccggcccccggat
tccccgttcccgcccctacgcccccatcccctccccgtgcgcccctccccgtgcgcccccctccccgtgcgccccccctc
cccgtgcgcccccctccccgtgcgccccccctccccgggcgcccccctccccgggcgccccccctccccgtgcgcccccc
cctccccgtgcgccccccctccccgtgcgcgccccgcctcttgcgcccctgcccccaggcgagcggctgccgcggcgcgg
ggaggggcgggcgctcggcgactcgtccccggggccccgcgcgggcccgggcagcaggggcgtgatgtcacggcagggag
ggggcgcgggagccgccgggccggcggggaggcgggggaggtgttttccagctttaaaaaggcaggaggcagagcgcggc
cctgcgtcagagcgagactcagaggtctagagccaccatgagcctctggcagcccctggtcctggtgctcctggtgctgg
gctgctgctttgctgcccccagacagcgccagtccacccttgtgctcttccctggagacctgagaaccaatctcaccgaca
ggcagctggcagaggaatacctgtaccgctatggttacactcgggtggcagagatgcgtggagagtcgaaatctctggggc
ctgcgctgctgcttctccagaagcaactgtccctgcccgagaccggtgagctggatagcgccacgctgaaggccatgcgaa
ccccacggtgcggggtcccagacctgggcagattccaaacctttgagggcgacctcaagtggcaccaccacaacatcacct
attggatccaaaactactcggaagacttgccgcgggcggtgattgacgacgcctttgcccgcgccttcgcactgtggagcg
cggtgacgccgctcaccttcactcgcgtgtacagccgggacgcagacatcgtcatccagtttggtgtcgcggagcacggag
acgggtatcccttcgacgggaaggacgggctcctggcacacgcctttcctcctggccccggcattcagggagacgcccatt
tcgacgatgacgagttgtggtccctgggcaagggcgtcgtggttccaactcggtttggaaacgcagatggcgcggcctgcc
acttccccttcatcttcgagggccgctcctactctgcctgcaccaccgacggtcgctccgacggcttgccctggtgcagta
ccacggccaactacgacaccgacgaccggtttggcttctgccccagcgagagactctacacccaggacggcaatgctgatg
ggaaaccctgccagtttccattcatcttccaaggccaatcctactccgcctgcaccacggacggtcgctccgacggctacc
gctggtgcgccaccaccgccaactacgaccgggacaagctcttcggcttctgcccgacccgagctgactcgacggtgatgg
ggggcaactcggcgggggagctgtgcgtcttccccttcactttcctgggtaaggagtactcgacctgtaccagcgagggcc
gcggagatgggcgcctctggtgcgctaccacctcgaactttgacagcgacaagaagtggggcttctgcccggaccaaggat
acagtttgttcctcgtggcggcgcatgagttcggccacgcgctgggcttagatcattcctcagtgccggaggcgctcatgt
accctatgtaccgcttcactgaggggccccccttgcataaggacgacgtgaatggcatccggcacctctatggtcctcgcc
ctgaacctgagccacggcctccaaccaccaccacaccgcagcccacggctcccccgacggtctgccccaccggacccccca
ctgtccacccctcagagcgccccacagctggccccacaggtcccccctcagctggccccacaggtccccccactgctggcc
cttctacggccactactgtgcctttgagtccggtggacgatgcctgcaacgtgaacatcttcgacgccatcgcggagattg
ggaaccagctgtatttgttcaaggatgggaagtactggcgattctctgagggcagggggagccggccgcagggccccttcc
ttatcgccgacaagtggcccgcgctgccccgcaagctggactcggtctttgaggagcggctctccaagaagcttttcttct
tctctgggcgccaggtgtgggtgtacacaggcgcgtcggtgctgggcccgaggcgtctggacaagctgggcctgggagccg
acgtggcccaggtgaccggggccctccggagtggcagggggaagatgctgctgttcagcgggcggcgcctctggaggttcg
acgtgaaggcgcagatggtggatccccggagcgccagcgaggtggaccggatgttccccggggtgcctttggacacgcacg
acgtcttccagtaccgagagaaagcctatttctgccaggaccgcttctactggcgcgtgagttcccggagtgagttgaacc
aggtggaccaagtgggctacgtgacctatgacatcctgcagtgccctgaggacgattacaaggatgacgacgataagtgat
aa
NFATc1P-MMP9cat
(DNA)
(SEQ ID NO: 648)
aggcaggaggaagaggaaaggggcgcagggcgctcggggagcagagccgggggcccgcggtggccgcagaggccgggccgg
ggcgcagaggccgggcgagctggccgcgctctgggccgccgcctccggaactccctgcgcctggcgcgcggccaccgtgg
tcccggcaacggcattaaacagagggaaacagacccgggattccgtcacccgggcggggggataaggacggctttgagag
cagacaggaaaagggagcttttctgcatggggtgaaaaaattatttattgaaggaggaggaggcggcagcggaggaaggg
gaggggcgggaggaggaggaagagccggccgcccccgccccggccccggctcctcaggagccaagggcagcctcgccagg
tcggtcccgggctcgaggaccgcggctggggtcgaggggctcagtctcccacgtgaccggctgggcgcgccccgccagac
ccggcctcgggattccctcctcccggcgagtctccgcccgccccgtcctggaggtggggagaaggagggcggggcggggg
ggacggaaactctccccgccaaatcctggccccaggcctggggacactcgcggcgggaagatttggaggggaggggaggg
ggaggggcgtgggggcgcggcctcgctggagtccccctgaccccccgacccccgcccaccggcctgggcgtcctcccgcg
gcccctcctcccctcccggcgcccggtgctctggggcgcgtgccacgcctggctcggcgccgtaggggcccccgcaggta
gagacccctggaaatggcctcgacgccgcaggagcgaggcggccaccaccccgctaatccgggcacgtctctccaggccg
aggcctgcggtggaaaagccggggttccatttgtgctgagtcggggcggccgaatggagccaggcctcgggacgcgggac
ggacgggctctggccgcgcaccttcgcgggctctgcagcgcccgaccgcctcccccggcagggaggaggcgcttgtgggg
ggcacccacggggcacagtgatccctgggggtctgcggacctcctgggccccgcagcagacacgagtttagcctttgggt
ttagtttaaatcacataagggtgtcgtgcaatcgatttatggtttctacacaccagacactttaacctccaacccccccc
atccaagccaacaagaaaatgcggtgccgtgttggcagctgagctgcgcccgaagagacgcagggagacgtaagagagga
aagtgtgagtggccggggggcctccccccgtcagaagtcgcgcagtcgcgcccataaaacgccccctccgggcggctagg
gcaggtgagcgcgtccccgggcctccccacgccggcccctgccacagagccgtctaggtcgagcagatatttacagaata
aaaatgacaataactcgacgtcccgggacggccacgcaatctgttagtaatttagcgggatgggaatttcctttctaggg
cctgccagtgaagcgcttttccaaatttccacagcgggggaagcctgcgattttacataatgacttcagcatgccgggct
ttctcgacacccctccccggcccccggcccccgccccccgccccttttccagcagggccgggctccctccggacacccgc
gtggactcaggcgtcccgtctggcccgttcgcccccgtttcccccgccagccccagcgcccccctgcccggcccccggat
tccccgttcccgcccctacgcccccatcccctccccgtgcgcccctccccgtgcgcccccctccccgtgcgccccccctc
cccgtgcgcccccctccccgtgcgccccccctccccgggcgcccccctccccgggcgccccccctccccgtgcgcccccc
cctccccgtgcgccccccctccccgtgcgcgccccgcctcttgcgcccctgcccccaggcgagcggctgccgcggcgcgg
ggaggggcgggcgctcggcgactcgtccccggggccccgcgcgggcccgggcagcaggggcgtgatgtcacggcagggag
ggggcgcgggagccgccgggccggcggggaggcgggggaggtgttttccagctttaaaaaggcaggaggcagagcgcggc
cctgcgtcagagcgagactcagaggtctagagccaccatgttccaaacctttgagggcgacctcaagtggcaccaccaca
acatcacctattggatccaaaactactcggaagacttgccgcgggcggtgattgacgacgcctttgcccgcgccttcgcac
tgtggagcgcggtgacgccgctcaccttcactcgcgtgtacagccgggacgcagacatcgtcatccagtttggtgtcgcgg
agcacggagacgggtatcccttcgacgggaaggacgggctcctggcacacgcctttcctcctggccccggcattcagggag
acgcccatttcgacgatgacgagttgtggtccctgggcaagggcgtcgtggttccaactcggtttggaaacgcagatggcg
cggcctgccacttccccttcatcttcgagggccgctcctactctgcctgcaccaccgacggtcgctccgacggcttgccct
ggtgcagtaccacggccaactacgacaccgacgaccggtttggcttctgccccagcgagagactctacacccaggacggca
atgctgatgggaaaccctgccagtttccattcatcttccaaggccaatcctactccgcctgcaccacggacggtcgctccg
acggctaccgctggtgcgccaccaccgccaactacgaccgggacaagctcttcggcttctgcccgacccgagctgactcga
cggtgatggggggcaactcggcgggggagctgtgcgtcttccccttcactttcctgggtaaggagtactcgacctgtacca
gcgagggccgcggagatgggcgcctctggtgcgctaccacctcgaactttgacagcgacaagaagtggggcttctgcccgg
accaaggatacagtttgttcctcgtggcggcgcatgagttcggccacgcgctgggcttagatcattcctcagtgccggagg
cgctcatgtaccctatgtaccgcttcactgaggggccccccttgcataaggacgacgtgaatggcatccggcacctctatg
gtcctcgccctgaacctgattacaaggatgacgacgataagtgataa
NFAT response element
(DNA)
(SEQ ID NO: 649)
ggaggaaaaactgtttcatacagaaggcgt
NFAT response element repeats
(DNA)
(SEQ ID NO: 650)
ggaggaaaaactgtttcatacagaaggcgtggaggaaaaactgtttcatacagaaggcgtggaggaaaaactgtttcatac
agaaggcgt
CMV minimal promoter
(DNA)
(SEQ ID NO: 651)
aggtaggcgtgtacggtgggaggtctatataagcagagctggtttagtgaaccgtcagatc
NFATREmCMV-MMP9
(DNA)
(SEQ ID NO: 652)
ggaggaaaaactgtttcatacagaaggcgtggaggaaaaactgtttcatacagaaggcgtggaggaaaaactgtttcatac
agaaggcgtagatctagactcaggtaggcgtgtacggtgggaggtctatataagcagagctggtttagtgaaccgtcagat
ctctagagccaccatgagcctctggcagcccctggtcctggtgctcctggtgctgggctgctgctttgctgcccccagaca
gcgccagtccacccttgtgctcttccctggagacctgagaaccaatctcaccgacaggcagctggcagaggaatacctgta
ccgctatggttacactcgggtggcagagatgcgtggagagtcgaaatctctggggcctgcgctgctgcttctccagaagca
actgtccctgcccgagaccggtgagctggatagcgccacgctgaaggccatgcgaaccccacggtgcggggtcccagacct
gggcagattccaaacctttgagggcgacctcaagtggcaccaccacaacatcacctattggatccaaaactactcggaaga
cttgccgcgggcggtgattgacgacgcctttgcccgcgccttcgcactgtggagcgcggtgacgccgctcaccttcactcg
cgtgtacagccgggacgcagacatcgtcatccagtttggtgtcgcggagcacggagacgggtatcccttcgacgggaagga
cgggctcctggcacacgcctttcctcctggccccggcattcagggagacgcccatttcgacgatgacgagttgtggtccct
gggcaagggcgtcgtggttccaactcggtttggaaacgcagatggcgcggcctgccacttccccttcatcttcgagggccg
ctcctactctgcctgcaccaccgacggtcgctccgacggcttgccctggtgcagtaccacggccaactacgacaccgacga
ccggtttggcttctgccccagcgagagactctacacccaggacggcaatgctgatgggaaaccctgccagtttccattcat
cttccaaggccaatcctactccgcctgcaccacggacggtcgctccgacggctaccgctggtgcgccaccaccgccaacta
cgaccgggacaagctcttcggcttctgcccgacccgagctgactcgacggtgatggggggcaactcggcgggggagctgtg
cgtcttccccttcactttcctgggtaaggagtactcgacctgtaccagcgagggccgcggagatgggcgcctctggtgcgc
taccacctcgaactttgacagcgacaagaagtggggcttctgcccggaccaaggatacagtttgttcctcgtggcggcgca
tgagttcggccacgcgctgggcttagatcattcctcagtgccggaggcgctcatgtaccctatgtaccgcttcactgaggg
gccccccttgcataaggacgacgtgaatggcatccggcacctctatggtcctcgccctgaacctgagccacggcctccaac
caccaccacaccgcagcccacggctcccccgacggtctgccccaccggaccccccactgtccacccctcagagcgccccac
agctggccccacaggtcccccctcagctggccccacaggtccccccactgctggcccttctacggccactactgtgccttt
gagtccggtggacgatgcctgcaacgtgaacatcttcgacgccatcgcggagattgggaaccagctgtatttgttcaagga
tgggaagtactggcgattctctgagggcagggggagccggccgcagggccccttccttatcgccgacaagtggcccgcgct
gccccgcaagctggactcggtctttgaggagcggctctccaagaagcttttcttcttctctgggcgccaggtgtgggtgta
cacaggcgcgtcggtgctgggcccgaggcgtctggacaagctgggcctgggagccgacgtggcccaggtgaccggggccct
ccggagtggcagggggaagatgctgctgttcagcgggcggcgcctctggaggttcgacgtgaaggcgcagatggtggatcc
ccggagcgccagcgaggtggaccggatgttccccggggtgcctttggacacgcacgacgtcttccagtaccgagagaaagc
ctatttctgccaggaccgcttctactggcgcgtgagttcccggagtgagttgaaccaggtggaccaagtgggctacgtgac
ctatgacatcctgcagtgccctgaggacgattacaaggatgacgacgataagtgataa
NFATREmCMV-MMP9cat
(DNA)
(SEQ ID NO: 653)
ggaggaaaaactgtttcatacagaaggcgtggaggaaaaactgtttcatacagaaggcgtggaggaaaaactgtttcatac
agaaggcgtagatctagactcaggtaggcgtgtacggtgggaggtctatataagcagagctggtttagtgaaccgtcagat
ctctagagccaccatgttccaaacctttgagggcgacctcaagtggcaccaccacaacatcacctattggatccaaaacta
ctcggaagacttgccgcgggcggtgattgacgacgcctttgcccgcgccttcgcactgtggagcgcggtgacgccgctcac
cttcactcgcgtgtacagccgggacgcagacatcgtcatccagtttggtgtcgcggagcacggagacgggtatcccttcga
cgggaaggacgggctcctggcacacgcctttcctcctggccccggcattcagggagacgcccatttcgacgatgacgagtt
gtggtccctgggcaagggcgtcgtggttccaactcggtttggaaacgcagatggcgcggcctgccacttccccttcatctt
cgagggccgctcctactctgcctgcaccaccgacggtcgctccgacggcttgccctggtgcagtaccacggccaactacga
caccgacgaccggtttggcttctgccccagcgagagactctacacccaggacggcaatgctgatgggaaaccctgccagtt
tccattcatcttccaaggccaatcctactccgcctgcaccacggacggtcgctccgacggctaccgctggtgcgccaccac
cgccaactacgaccgggacaagctcttcggcttctgcccgacccgagctgactcgacggtgatggggggcaactcggcggg
ggagctgtgcgtcttccccttcactttcctgggtaaggagtactcgacctgtaccagcgagggccgcggagatgggcgcct
ctggtgcgctaccacctcgaactttgacagcgacaagaagtggggcttctgcccggaccaaggatacagtttgttcctcgt
ggcggcgcatgagttcggccacgcgctgggcttagatcattcctcagtgccggaggcgctcatgtaccctatgtaccgctt
cactgaggggccccccttgcataaggacgacgtgaatggcatccggcacctctatggtcctcgccctgaacctgattacaa
ggatgacgacgataagtgataa
C2 scFir
(DNA)
(SEQ ID NO: 654)
gaggtgcagctggtggagtctgggggaggcctggtcaagcctggggggtccctgagactctcctgtgcagcctctggattc
accttcagtggctatgccatgagctgggtccgccaggctccagggaaggggctggagtgggtctcaaccattagtagtggc
ggaacctacatatactaccccgactcagtgaagggccgattcaccatctccagagacaacgccaagaactcactgtatctg
caaatgaacagcctgagagccgaggacacggccgtgtattactgtgcgagacttgggggggataattactacgaatacttc
gatgtctggggcaaagggaccacggtcaccgtctcctccggcggtggcggatccggcggtggcggatccggcggtggcgga
tccgacattgtgctgacccagtctccagcctccttggccgtgtctccaggacagagggccaccatcacctgcagagccagt
aagagtgtcagtaccagcggatactcctacatgcactggtatcagcagaaaccaggacaacctcctaaactcctgatttac
ctggcatccaatctggagagcggggtcccagccaggttcagcggcagtgggtctgggaccgatttcaccctcacaattaat
cctgtggaagctaatgatactgcaaattattactgtcagcacagtagggagctgcctttcacattcggcggagggaccaag
gtggagatcaaacgaact
(amino acids)
(SEQ ID NO: 655)
EVQLVESGGGLVKPGGSLRLSCAASGFTFSGYAMSWVRQAPGKGLEWVSTISSGGTYIYYPDSVKGRFTISRDNAKNSLY
LQMNSLRAEDTAVYYCARLGGDNYYEYFDVWGKGTTVTVSSGGGGSGGGGSGGGGSDIVLTQSPASLAVSPGQRATITCR
ASKSVSTSGYSYMHWYQQKPGQPPKLLIYLASNLESGVPARFSGSGSGTDFTLTINPVEANDTANYYCQHSRELPFTFGG
GTKVEIKRT
CD8 transmembrane domain
(DNA)
(SEQ ID NO: 656)
atctacatctgggcgcccttggccgggacttgtggggtccttctcctgtcactggttatcaccctttactgc
(amino acids)
(SEQ ID NO: 657)
IYIWAPLAGTCGVLLLSLVITLYC
4-1BB domain
(DNA)
(SEQ ID NO: 658)
aaacggggcagaaagaaactcctgtatatattcaaacaaccatttatgagaccagtacaaactactcaagaggaagatggc
tgtagctgccgatttccagaagaagaagaaggaggatgtgaactg
(amino acids)
(SEQ ID NO: 659)
KRGRKKLLYIFKQPFMRPVQTTQEEDGCSCRFPEEEEGGCEL
CD3 zeta domain
(DNA)
(SEQ ID NO: 660)
agagtgaagttcagcaggagcgcagacgcccccgcgtacaagcagggccagaaccagctctataacgagctcaatctagga
cgaagagaggagtacgatgttttggacaagagacgtggccgggaccctgagatggggggaaagccgagaaggaagaaccct
caggaaggcctgtacaatgaactgcagaaagataagatggcggaggcctacagtgagattgggatgaaaggcgagcgccgg
aggggcaaggggcacgatggcctttaccagggtctcagtacagccaccaaggacacctacgacgcccttcacatgcaggcc
ctgccccctcgc
(amino acids)
(SEQ ID NO: 661)
RVKFSRSADAPAYKQGQNQLYNELNLGRREEYDVLDKRRGRDPEMGGKPRRKNPQEGLYNELQKDKMAEAYSEIGMKGER
RRGKGHDGLYQGLSTATKDTYDALHMQALPPR
Human IgG1 Fc linker
(DNA)
(SEQ ID NO: 662)
gagcccaaatcttgtgacaaaactcacacatgcccaccgtgcccagcacctgaactcctggggggaccgtcagtcttcctc
ttccccccaaaacccaaggacaccctcatgatctcccggacccctgaggtcacatgcgtggtggtggacgtgagccacgaa
gaccctgaggtcaagttcaactggtacgtggacggcgtggaggtgcataatgccaagacaaagccgcgggaggagcagtac
aacagcacgtaccgtgtggtcagcgtcctcaccgtcctgcaccaggactggctgaatggcaaggagtacaagtgcaaggtc
tccaacaaagccctcccagcccccatcgagaaaaccatctccaaagccaaagggcagccccgagaaccacaggtgtacacc
ctgcccccatcccgggaggagatgaccaagaaccaggtcagcctgacctgcctggtcaaaggcttctatcccagcgacatc
gccgtggagtgggagagcaatgggcagccggagaacaactacaagaccacgcctcccgtgctggactccgacggctccttc
ttcctctacagcaagctcaccgtggacaagagcaggtggcagcaggggaacgtcttctcatgctccgtgatgcatgaggct
ctgcacaaccactacacgcagaagagcctctccctgtctccgggtaaa
(amino acids)
(SEQ ID NO: 663)
EPKSCDKTHTCPPCPAPELLGGPSVFLFPPKPKDTLMISRTPEVTCVVVDVSHEDPEVKFNWYVDGVEVHNAKTKPREEQ
YNSTYRVVSVLTVLHQDWLNGKEYKCKVSNKALPAPIEKTISKAKGQPREPQVYTLPPSREEMTKNQVSLTCLVKGFYPS
DIAVEWESNGQPENNYKTTPPVLDSDGSFFLYSKLTVDKSRWQQGNVFSCSVMHEALHNHYTQKSLSLSPGK
C2 CAR FC linker
(DNA)
(SEQ ID NO: 664)
gaggtgcagctggtggagtctgggggaggcctggtcaagcctggggggtccctgagactctcctgtgcagcctctggattc
accttcagtggctatgccatgagctgggtccgccaggctccagggaaggggctggagtgggtctcaaccattagtagtggc
ggaacctacatatactaccccgactcagtgaagggccgattcaccatctccagagacaacgccaagaactcactgtatctg
caaatgaacagcctgagagccgaggacacggccgtgtattactgtgcgagacttgggggggataattactacgaatacttc
gatgtctggggcaaagggaccacggtcaccgtctcctccggcggtggcggatccggcggtggcggatccggcggtggcgga
tccgacattgtgctgacccagtctccagcctccttggccgtgtctccaggacagagggccaccatcacctgcagagccagt
aagagtgtcagtaccagcggatactcctacatgcactggtatcagcagaaaccaggacaacctcctaaactcctgatttac
ctggcatccaatctggagagcggggtcccagccaggttcagcggcagtgggtctgggaccgatttcaccctcacaattaat
cctgtggaagctaatgatactgcaaattattactgtcagcacagtagggagctgcctttcacattcggcggagggaccaag
gtggagatcaaacgaactgagcccaaatcttgtgacaaaactcacacatgcccaccgtgcccagcacctgaactcctgggg
ggaccgtcagtcttcctcttccccccaaaacccaaggacaccctcatgatctcccggacccctgaggtcacatgcgtggtg
gtggacgtgagccacgaagaccctgaggtcaagttcaactggtacgtggacggcgtggaggtgcataatgccaagacaaag
ccgcgggaggagcagtacaacagcacgtaccgtgtggtcagcgtcctcaccgtcctgcaccaggactggctgaatggcaag
gagtacaagtgcaaggtctccaacaaagccctcccagcccccatcgagaaaaccatctccaaagccaaagggcagccccga
gaaccacaggtgtacaccctgcccccatcccgggaggagatgaccaagaaccaggtcagcctgacctgcctggtcaaaggc
ttctatcccagcgacatcgccgtggagtgggagagcaatgggcagccggagaacaactacaagaccacgcctcccgtgctg
gactccgacggctccttcttcctctacagcaagctcaccgtggacaagagcaggtggcagcaggggaacgtcttctcatgc
tccgtgatgcatgaggctctgcacaaccactacacgcagaagagcctctccctgtctccgggtaaaatctacatctgggcg
cccttggccgggacttgtggggtccttctcctgtcactggttatcaccctttactgcaaacggggcagaaagaaactcctg
tatatattcaaacaaccatttatgagaccagtacaaactactcaagaggaagatggctgtagctgccgatttccagaagaa
gaagaaggaggatgtgaactgagagtgaagttcagcaggagcgcagacgcccccgcgtacaagcagggccagaaccagctc
tataacgagctcaatctaggacgaagagaggagtacgatgttttggacaagagacgtggccgggaccctgagatgggggga
aagccgagaaggaagaaccctcaggaaggcctgtacaatgaactgcagaaagataagatggcggaggcctacagtgagatt
gggatgaaaggcgagcgccggaggggcaaggggcacgatggcctttaccagggtctcagtacagccaccaaggacacctac
gacgcccttcacatgcaggccctgccccctcgctgataa
(amino acids)
(SEQ ID NO: 665)
EVQLVESGGGLVKPGGSLRLSCAASGFTFSGYAMSWVRQAPGKGLEWVSTISSGGTYIYYPDSVKGRFTISRDNAKNSLY
LQMNSLRAEDTAVYYCARLGGDNYYEYFDVWGKGTTVTVSSGGGGSGGGGSGGGGSDIVLTQSPASLAVSPGQRATITCR
ASKSVSTSGYSYMHWYQQKPGQPPKLLIYLASNLESGVPARFSGSGSGTDFTLTINPVEANDTANYYCQHSRELPFTFGG
GTKVEIKRTEPKSCDKTHTCPPCPAPELLGGPSVFLFPPKPKDTLMISRTPEVTCVVVDVSHEDPEVKFNWYVDGVEVHN
AKTKPREEQYNSTYRVVSVLTVLHQDWLNGKEYKCKVSNKALPAPIEKTISKAKGQPREPQVYTLPPSREEMTKNQVSLT
CLVKGFYPSDIAVEWESNGQPENNYKTTPPVLDSDGSFFLYSKLTVDKSRWQQGNVFSCSVMHEALHNHYTQKSLSLSPG
KIYIWAPLAGTCGVLLLSLVITLYCKRGRKKLLYIFKQPFMRPVQTTQEEDGCSCRFPEEEEGGCELRVKFSRSADAPAY
KQGQNQLYNELNLGRREEYDVLDKRRGRDPEMGGKPRRKNPQEGLYNELQKDKMAEAYSEIGMKGERRRGKGHDGLYQGL
STATKDTYDALHMQALPPR**
IgD/Fc linker
(DNA)
(SEQ ID NO: 666)
gagtctccaaaggcacaggcctcctcagtgcccactgcacaaccccaagcagagggcagcctcgccaaggcaaccacagcc
ccagccaccacccgtaacacaggaagaggcggcgaagagaagaaaaaggagaaggagaaagaggaacaagaagagagagag
acaaagacaccagagcccaaatcttgtgacaaaactcacacatgcccaccgtgcccagcacctgaactcctggggggaccg
tcagtcttcctcttccccccaaaacccaaggacaccctcatgatctcccggacccctgaggtcacatgcgtggtggtggac
gtgagccacgaagaccctgaggtcaagttcaactggtacgtggacggcgtggaggtgcataatgccaagacaaagccgcgg
gaggagcagtacaacagcacgtaccgtgtggtcagcgtcctcaccgtcctgcaccaggactggctgaatggcaaggagtac
aagtgcaaggtctccaacaaagccctcccagcccccatcgagaaaaccatctccaaagccaaagggcagccccgagaacca
caggtgtacaccctgcccccatcccgggaggagatgaccaagaaccaggtcagcctgacctgcctggtcaaaggcttctat
cccagcgacatcgccgtggagtgggagagcaatgggcagccggagaacaactacaagaccacgcctcccgtgctggactcc
gacggctccttcttcctctacagcaagctcaccgtggacaagagcaggtggcagcaggggaacgtcttctcatgctccgtg
atgcatgaggctctgcacaaccactacacgcagaagagcctctccctgtctccgggtaaa
(amino acids)
(SEQ ID NO: 667)
ESPKAQASSVPTAQPQAEGSLAKATTAPATTRNTGRGGEEKKKEKEKEEQEERETKTPEPKSCDKTHTCPPCPAPELLGG
PSVFLFPPKPKDTLMISRTPEVTCVVVDVSHEDPEVKFNWYVDGVEVHNAKTKPREEQYNSTYRVVSVLTVLHQDWLNGK
EYKCKVSNKALPAPIEKTISKAKGQPREPQVYTLPPSREEMTKNQVSLTCLVKGFYPSDIAVEWESNGQPENNYKTTPPV
LDSDGSFFLYSKLTVDKSRWQQGNVFSCSVMHEALHNHYTQKSLSLSPGK
C2 CAR IgD/FC linker
(DNA)
(SEQ ID NO: 668)
gaggtgcagctggtggagtctgggggaggcctggtcaagcctggggggtccctgagactctcctgtgcagcctctggattc
accttcagtggctatgccatgagctgggtccgccaggctccagggaaggggctggagtgggtctcaaccattagtagtggc
ggaacctacatatactaccccgactcagtgaagggccgattcaccatctccagagacaacgccaagaactcactgtatctg
caaatgaacagcctgagagccgaggacacggccgtgtattactgtgcgagacttgggggggataattactacgaatacttc
gatgtctggggcaaagggaccacggtcaccgtctcctccggcggtggcggatccggcggtggcggatccggcggtggcgga
tccgacattgtgctgacccagtctccagcctccttggccgtgtctccaggacagagggccaccatcacctgcagagccagt
aagagtgtcagtaccagcggatactcctacatgcactggtatcagcagaaaccaggacaacctcctaaactcctgatttac
ctggcatccaatctggagagcggggtcccagccaggttcagcggcagtgggtctgggaccgatttcaccctcacaattaat
cctgtggaagctaatgatactgcaaattattactgtcagcacagtagggagctgcctttcacattcggcggagggaccaag
gtggagatcaaacgaactgagtctccaaaggcacaggcctcctcagtgcccactgcacaaccccaagcagagggcagcctc
gccaaggcaaccacagccccagccaccacccgtaacacaggaagaggcggcgaagagaagaaaaaggagaaggagaaagag
gaacaagaagagagagagacaaagacaccagagcccaaatcttgtgacaaaactcacacatgcccaccgtgcccagcacct
gaactcctggggggaccgtcagtcttcctcttccccccaaaacccaaggacaccctcatgatctcccggacccctgaggtc
acatgcgtggtggtggacgtgagccacgaagaccctgaggtcaagttcaactggtacgtggacggcgtggaggtgcataat
gccaagacaaagccgcgggaggagcagtacaacagcacgtaccgtgtggtcagcgtcctcaccgtcctgcaccaggactgg
ctgaatggcaaggagtacaagtgcaaggtctccaacaaagccctcccagcccccatcgagaaaaccatctccaaagccaaa
gggcagccccgagaaccacaggtgtacaccctgcccccatcccgggaggagatgaccaagaaccaggtcagcctgacctgc
ctggtcaaaggcttctatcccagcgacatcgccgtggagtgggagagcaatgggcagccggagaacaactacaagaccacg
cctcccgtgctggactccgacggctccttcttcctctacagcaagctcaccgtggacaagagcaggtggcagcaggggaac
gtcttctcatgctccgtgatgcatgaggctctgcacaaccactacacgcagaagagcctctccctgtctccgggtaaaatc
tacatctgggcgcccttggccgggacttgtggggtccttctcctgtcactggttatcaccctttactgcaaacggggcaga
aagaaactcctgtatatattcaaacaaccatttatgagaccagtacaaactactcaagaggaagatggctgtagctgccga
tttccagaagaagaagaaggaggatgtgaactgagagtgaagttcagcaggagcgcagacgcccccgcgtacaagcagggc
cagaaccagctctataacgagctcaatctaggacgaagagaggagtacgatgttttggacaagagacgtggccgggaccct
gagatggggggaaagccgagaaggaagaaccctcaggaaggcctgtacaatgaactgcagaaagataagatggcggaggcc
tacagtgagattgggatgaaaggcgagcgccggaggggcaaggggcacgatggcctttaccagggtctcagtacagccacc
aaggacacctacgacgcccttcacatgcaggccctgccccctcgctgataa
(amino acids)
(SEQ ID NO: 669)
EVQLVESGGGLVKPGGSLRLSCAASGFTFSGYAMSWVRQAPGKGLEWVSTISSGGTYIYYPDSVKGRFTISRDNAKNSLY
LQMNSLRAEDTAVYYCARLGGDNYYEYFDVWGKGTTVTVSSGGGGSGGGGSGGGGSDIVLTQSPASLAVSPGQRATITCR
ASKSVSTSGYSYMHWYQQKPGQPPKLLIYLASNLESGVPARFSGSGSGTDFTLTINPVEANDTANYYCQHSRELPFTFGG
GTKVEIKRTESPKAQASSVPTAQPQAEGSLAKATTAPATTRNTGRGGEEKKKEKEKEEQEERETKTPEPKSCDKTHTCPP
CPAPELLGGPSVFLFPPKPKDTLMISRTPEVTCVVVDVSHEDPEVKFNWYVDGVEVHNAKTKPREEQYNSTYRVVSVLTV
LHQDWLNGKEYKCKVSNKALPAPIEKTISKAKGQPREPQVYTLPPSREEMTKNQVSLTCLVKGFYPSDIAVEWESNGQPE
NNYKTTPPVLDSDGSFFLYSKLTVDKSRWQQGNVFSCSVMHEALHNHYTQKSLSLSPGKIYIWAPLAGTCGVLLLSLVIT
LYCKRGRKKLLYIFKQPFMRPVQTTQEEDGCSCRFPEEEEGGCELRVKFSRSADAPAYKQGQNQLYNELNLGRREEYDVL
DKRRGRDPEMGGKPRRKNPQEGLYNELQKDKMAEAYSEIGMKGERRRGKGHDGLYQGLSTATKDTYDALHMQALPPR**
Fc hingeless Y407R linker
(DNA)
(SEQ ID NO: 670)
gcacctgaactcctggggggaccgtcagtcttcctcttccccccaaaacccaaggacaccctcatgatctcccggacccct
gaggtcacatgcgtggtggtggacgtgagccacgaagaccctgaggtcaagttcaactggtacgtggacggcgtggaggtg
cataatgccaagacaaagccgcgggaggagcagtacaacagcacgtaccgtgtggtcagcgtcctcaccgtcctgcaccag
gactggctgaatggcaaggagtacaagtgcaaggtctccaacaaagccctcccagcccccatcgagaaaaccatctccaaa
gccaaagggcagccccgagaaccacaggtgtacaccctgcccccatcccgggaggagatgaccaagaaccaggtcagcctg
acctgcctggtcaaaggcttctatcccagcgacatcgccgtggagtgggagagcaatgggcagccggagaacaactacaag
accacgcctcccgtgctggactccgacggctccttcttcctcaggagcaagctcaccgtggacaagagcaggtggcagcag
gggaacgtcttctcatgctccgtgatgcatgaggctctgcacaaccactacacgcagaagagcctctccctgtctccgggt
aaa
(amino acids)
(SEQ ID NO: 671)
APELLGGPSVFLFPPKPKDTLMISRTPEVTCVVVDVSHEDPEVKFNWYVDGVEVHNAKTKPREEQYNSTYRVVSVLTVLH
QDWLNGKEYKCKVSNKALPAPIEKTISKAKGQPREPQVYTLPPSREEMTKNQVSLTCLVKGFYPSDIAVEWESNGQPENN
YKTTPPVLDSDGSFFLRSKLTVDKSRWQQGNVFSCSVMHEALHNHYTQKSLSLSPGK
C2 CAR FCHingeless/Y407R linker
(DNA)
(SEQ ID NO: 672)
gaggtgcagctggtggagtctgggggaggcctggtcaagcctggggggtccctgagactctcctgtgcagcctctggattc
accttcagtggctatgccatgagctgggtccgccaggctccagggaaggggctggagtgggtctcaaccattagtagtggc
ggaacctacatatactaccccgactcagtgaagggccgattcaccatctccagagacaacgccaagaactcactgtatctg
caaatgaacagcctgagagccgaggacacggccgtgtattactgtgcgagacttgggggggataattactacgaatacttc
gatgtctggggcaaagggaccacggtcaccgtctcctccggcggtggcggatccggcggtggcggatccggcggtggcgga
tccgacattgtgctgacccagtctccagcctccttggccgtgtctccaggacagagggccaccatcacctgcagagccagt
aagagtgtcagtaccagcggatactcctacatgcactggtatcagcagaaaccaggacaacctcctaaactcctgatttac
ctggcatccaatctggagagcggggtcccagccaggttcagcggcagtgggtctgggaccgatttcaccctcacaattaat
cctgtggaagctaatgatactgcaaattattactgtcagcacagtagggagctgcctttcacattcggcggagggaccaag
gtggagatcaaacgaactgcacctgaactcctggggggaccgtcagtcttcctcttccccccaaaacccaaggacaccctc
atgatctcccggacccctgaggtcacatgcgtggtggtggacgtgagccacgaagaccctgaggtcaagttcaactggtac
gtggacggcgtggaggtgcataatgccaagacaaagccgcgggaggagcagtacaacagcacgtaccgtgtggtcagcgtc
ctcaccgtcctgcaccaggactggctgaatggcaaggagtacaagtgcaaggtctccaacaaagccctcccagcccccatc
gagaaaaccatctccaaagccaaagggcagccccgagaaccacaggtgtacaccctgcccccatcccgggaggagatgacc
aagaaccaggtcagcctgacctgcctggtcaaaggcttctatcccagcgacatcgccgtggagtgggagagcaatgggcag
ccggagaacaactacaagaccacgcctcccgtgctggactccgacggctccttcttcctcaggagcaagctcaccgtggac
aagagcaggtggcagcaggggaacgtcttctcatgctccgtgatgcatgaggctctgcacaaccactacacgcagaagagc
ctctccctgtctccgggtaaaatctacatctgggcgcccttggccgggacttgtggggtccttctcctgtcactggttatc
accctttactgcaaacggggcagaaagaaactcctgtatatattcaaacaaccatttatgagaccagtacaaactactcaa
gaggaagatggctgtagctgccgatttccagaagaagaagaaggaggatgtgaactgagagtgaagttcagcaggagcgca
gacgcccccgcgtacaagcagggccagaaccagctctataacgagctcaatctaggacgaagagaggagtacgatgttttg
gacaagagacgtggccgggaccctgagatggggggaaagccgagaaggaagaaccctcaggaaggcctgtacaatgaactg
cagaaagataagatggcggaggcctacagtgagattgggatgaaaggcgagcgccggaggggcaaggggcacgatggcctt
taccagggtctcagtacagccaccaaggacacctacgacgcccttcacatgcaggccctgccccctcgctgataa
(amino acids)
(SEQ ID NO: 673)
EVQLVESGGGLVKPGGSLRLSCAASGFTFSGYAMSWVRQAPGKGLEWVSTISSGGTYIYYPDSVKGRFTISRDNAKNSLY
LQMNSLRAEDTAVYYCARLGGDNYYEYFDVWGKGTTVTVSSGGGGSGGGGSGGGGSDIVLTQSPASLAVSPGQRATITCR
ASKSVSTSGYSYMHWYQQKPGQPPKLLIYLASNLESGVPARFSGSGSGTDFTLTINPVEANDTANYYCQHSRELPFTFGG
GTKVEIKRTAPELLGGPSVFLFPPKPKDTLMISRTPEVTCVVVDVSHEDPEVKFNWYVDGVEVHNAKTKPREEQYNSTYR
VVSVLTVLHQDWLNGKEYKCKVSNKALPAPIEKTISKAKGQPREPQVYTLPPSREEMTKNQVSLTCLVKGFYPSDIAVEW
ESNGQPENNYKTTPPVLDSDGSFFLRSKLTVDKSRWQQGNVFSCSVMHEALHNHYTQKSLSLSPGKIYIWAPLAGTCGVL
LLSLVITLYCKRGRKKLLYIFKQPFMRPVQTTQEEDGCSCRFPEEEEGGCELRVKFSRSADAPAYKQGQNQLYNELNLGR
REEYDVLDKRRGRDPEMGGKPRRKNPQEGLYNELQKDKMAEAYSEIGMKGERRRGKGHDGLYQGLSTATKDTYDALHMQA
LPPR**
IgD/FCHingeless/Y407R linker
(DNA)
(SEQ ID NO: 674)
gagtctccaaaggcacaggcctcctcagtgcccactgcacaaccccaagcagagggcagcctcgccaaggcaaccacagcc
ccagccaccacccgtaacacaggaagaggcggcgaagagaagaaaaaggagaaggagaaagaggaacaagaagagagagag
acaaagacaccagcacctgaactcctggggggaccgtcagtcttcctcttccccccaaaacccaaggacaccctcatgatc
tcccggacccctgaggtcacatgcgtggtggtggacgtgagccacgaagaccctgaggtcaagttcaactggtacgtggac
ggcgtggaggtgcataatgccaagacaaagccgcgggaggagcagtacaacagcacgtaccgtgtggtcagcgtcctcacc
gtcctgcaccaggactggctgaatggcaaggagtacaagtgcaaggtctccaacaaagccctcccagcccccatcgagaaa
accatctccaaagccaaagggcagccccgagaaccacaggtgtacaccctgcccccatcccgggaggagatgaccaagaac
caggtcagcctgacctgcctggtcaaaggcttctatcccagcgacatcgccgtggagtgggagagcaatgggcagccggag
aacaactacaagaccacgcctcccgtgctggactccgacggctccttcttcctcaggagcaagctcaccgtggacaagagc
aggtggcagcaggggaacgtcttctcatgctccgtgatgcatgaggctctgcacaaccactacacgcagaagagcctctcc
ctgtctccgggtaaa
(amino acids)
(SEQ ID NO: 675)
ESPKAQASSVPTAQPQAEGSLAKATTAPATTRNTGRGGEEKKKEKEKEEQEERETKTPAPELLGGPSVFLFPPKPKDTLM
ISRTPEVTCVVVDVSHEDPEVKFNWYVDGVEVHNAKTKPREEQYNSTYRVVSVLTVLHQDWLNGKEYKCKVSNKALPAPI
EKTISKAKGQPREPQVYTLPPSREEMTKNQVSLTCLVKGFYPSDIAVEWESNGQPENNYKTTPPVLDSDGSFFLRSKLTV
DKSRWQQGNVFSCSVMHEALHNHYTQKSLSLSPGK
C2 CAR IgD/FCHingeless/Y407R linker
(DNA)
(SEQ ID NO: 676)
gaggtgcagctggtggagtctgggggaggcctggtcaagcctggggggtccctgagactctcctgtgcagcctctggattc
accttcagtggctatgccatgagctgggtccgccaggctccagggaaggggctggagtgggtctcaaccattagtagtggc
ggaacctacatatactaccccgactcagtgaagggccgattcaccatctccagagacaacgccaagaactcactgtatctg
caaatgaacagcctgagagccgaggacacggccgtgtattactgtgcgagacttgggggggataattactacgaatacttc
gatgtctggggcaaagggaccacggtcaccgtctcctccggcggtggcggatccggcggtggcggatccggcggtggcgga
tccgacattgtgctgacccagtctccagcctccttggccgtgtctccaggacagagggccaccatcacctgcagagccagt
aagagtgtcagtaccagcggatactcctacatgcactggtatcagcagaaaccaggacaacctcctaaactcctgatttac
ctggcatccaatctggagagcggggtcccagccaggttcagcggcagtgggtctgggaccgatttcaccctcacaattaat
cctgtggaagctaatgatactgcaaattattactgtcagcacagtagggagctgcctttcacattcggcggagggaccaag
gtggagatcaaacgaactgagtctccaaaggcacaggcctcctcagtgcccactgcacaaccccaagcagagggcagcctc
gccaaggcaaccacagccccagccaccacccgtaacacaggaagaggcggcgaagagaagaaaaaggagaaggagaaagag
gaacaagaagagagagagacaaagacaccagcacctgaactcctggggggaccgtcagtcttcctcttccccccaaaaccc
aaggacaccctcatgatctcccggacccctgaggtcacatgcgtggtggtggacgtgagccacgaagaccctgaggtcaag
ttcaactggtacgtggacggcgtggaggtgcataatgccaagacaaagccgcgggaggagcagtacaacagcacgtaccgt
gtggtcagcgtcctcaccgtcctgcaccaggactggctgaatggcaaggagtacaagtgcaaggtctccaacaaagccctc
ccagcccccatcgagaaaaccatctccaaagccaaagggcagccccgagaaccacaggtgtacaccctgcccccatcccgg
gaggagatgaccaagaaccaggtcagcctgacctgcctggtcaaaggcttctatcccagcgacatcgccgtggagtgggag
agcaatgggcagccggagaacaactacaagaccacgcctcccgtgctggactccgacggctccttcttcctcaggagcaag
ctcaccgtggacaagagcaggtggcagcaggggaacgtcttctcatgctccgtgatgcatgaggctctgcacaaccactac
acgcagaagagcctctccctgtctccgggtaaaatctacatctgggcgcccttggccgggacttgtggggtccttctcctg
tcactggttatcaccctttactgcaaacggggcagaaagaaactcctgtatatattcaaacaaccatttatgagaccagta
caaactactcaagaggaagatggctgtagctgccgatttccagaagaagaagaaggaggatgtgaactgagagtgaagttc
agcaggagcgcagacgcccccgcgtacaagcagggccagaaccagctctataacgagctcaatctaggacgaagagaggag
tacgatgttttggacaagagacgtggccgggaccctgagatggggggaaagccgagaaggaagaaccctcaggaaggcctg
tacaatgaactgcagaaagataagatggcggaggcctacagtgagattgggatgaaaggcgagcgccggaggggcaagggg
cacgatggcctttaccagggtctcagtacagccaccaaggacacctacgacgcccttcacatgcaggccctgccccctcgc
tgataa
(amino acids)
(SEQ ID NO: 677)
EVQLVESGGGLVKPGGSLRLSCAASGFTFSGYAMSWVRQAPGKGLEWVSTISSGGTYIYYPDSVKGRFTISRDNAKNSLY
LQMNSLRAEDTAVYYCARLGGDNYYEYFDVWGKGTTVTVSSGGGGSGGGGSGGGGSDIVLTQSPASLAVSPGQRATITCR
ASKSVSTSGYSYMHWYQQKPGQPPKLLIYLASNLESGVPARFSGSGSGTDFTLTINPVEANDTANYYCQHSRELPFTFGG
GTKVEIKRTESPKAQASSVPTAQPQAEGSLAKATTAPATTRNTGRGGEEKKKEKEKEEQEERETKTPAPELLGGPSVFLF
PPKPKDTLMISRTPEVTCVVVDVSHEDPEVKFNWYVDGVEVHNAKTKPREEQYNSTYRVVSVLTVLHQDWLNGKEYKCKV
SNKALPAPIEKTISKAKGQPREPQVYTLPPSREEMTKNQVSLTCLVKGFYPSDIAVEWESNGQPENNYKTTPPVLDSDGS
FFLRSKLTVDKSRWQQGNVFSCSVMHEALHNHYTQKSLSLSPGKIYIWAPLAGTCGVLLLSLVITLYCKRGRKKLLYIFK
QPFMRPVQTTQEEDGCSCRFPEEEEGGCELRVKFSRSADAPAYKQGQNQLYNELNLGRREEYDVLDKRRGRDPEMGGKPR
RKNPQEGLYNELQKDKMAEAYSEIGMKGERRRGKGHDGLYQGLSTATKDTYDALHMQALPPR**
IgD linker
(DNA)
(SEQ ID NO: 678)
gagtctccaaaggcacaggcctcctcagtgcccactgcacaaccccaagcagagggcagcctcgccaaggcaaccacagcc
ccagccaccacccgtaacacaggaagaggcggcgaagagaagaaaaaggagaaggagaaagaggaacaagaagagagagag
acaaagacacca
(amino acids)
(SEQ ID NO: 679)
ESPKAQASSVPTAQPQAEGSLAKATTAPATTRNTGRGGEEKKKEKEKEEQEERETKTP
C2 CAR IgD linker
(DNA)
(SEQ ID NO: 680)
gaggtgcagctggtggagtctgggggaggcctggtcaagcctggggggtccctgagactctcctgtgcagcctctggattc
accttcagtggctatgccatgagctgggtccgccaggctccagggaaggggctggagtgggtctcaaccattagtagtggc
ggaacctacatatactaccccgactcagtgaagggccgattcaccatctccagagacaacgccaagaactcactgtatctg
caaatgaacagcctgagagccgaggacacggccgtgtattactgtgcgagacttgggggggataattactacgaatacttc
gatgtctggggcaaagggaccacggtcaccgtctcctccggcggtggcggatccggcggtggcggatccggcggtggcgga
tccgacattgtgctgacccagtctccagcctccttggccgtgtctccaggacagagggccaccatcacctgcagagccagt
aagagtgtcagtaccagcggatactcctacatgcactggtatcagcagaaaccaggacaacctcctaaactcctgatttac
ctggcatccaatctggagagcggggtcccagccaggttcagcggcagtgggtctgggaccgatttcaccctcacaattaat
cctgtggaagctaatgatactgcaaattattactgtcagcacagtagggagctgcctttcacattcggcggagggaccaag
gtggagatcaaacgaactgagtctccaaaggcacaggcctcctcagtgcccactgcacaaccccaagcagagggcagcctc
gccaaggcaaccacagccccagccaccacccgtaacacaggaagaggcggcgaagagaagaaaaaggagaaggagaaagag
gaacaagaagagagagagacaaagacaccaatctacatctgggcgcccttggccgggacttgtggggtccttctcctgtca
ctggttatcaccctttactgcaaacggggcagaaagaaactcctgtatatattcaaacaaccatttatgagaccagtacaa
actactcaagaggaagatggctgtagctgccgatttccagaagaagaagaaggaggatgtgaactgagagtgaagttcagc
aggagcgcagacgcccccgcgtacaagcagggccagaaccagctctataacgagctcaatctaggacgaagagaggagtac
gatgttttggacaagagacgtggccgggaccctgagatggggggaaagccgagaaggaagaaccctcaggaaggcctgtac
aatgaactgcagaaagataagatggcggaggcctacagtgagattgggatgaaaggcgagcgccggaggggcaaggggcac
gatggcctttaccagggtctcagtacagccaccaaggacacctacgacgcccttcacatgcaggccctgccccctcgctga
taa
(amino acids)
(SEQ ID NG: 681)
EVQLVESGGGLVKPGGSLRLSCAASGFTFSGYAMSWVRQAPGKGLEWVSTISSGGTYIYYPDSVKGRFTISRDNAKNSLY
LQMNSLRAEDTAVYYCARLGGDNYYEYFDVWGKGTTVTVSSGGGGSGGGGSGGGGSDIVLTQSPASLAVSPGQRATITCR
ASKSVSTSGYSYMHWYQQKPGQPPKLLIYLASNLESGVPARFSGSGSGTDFTLTINPVEANDTANYYCQHSRELPFTFGG
GTKVEIKRTESPKAQASSVPTAQPQAEGSLAKATTAPATTRNTGRGGEEKKKEKEKEEQEERETKTPIYIWAPLAGTCGV
LLLSLVITLYCKRGRKKLLYIFKQPFMRPVQTTQEEDGCSCRFPEEEEGGCELRVKFSRSADAPAYKQGQNQLYNELNLO
RREEYDVLDKRRGRDPEMGGKPRRKNPQEGLYNELQKDKMAEAYSEIGMKGERRRGKGHDGLYQGLSTATKDTYDALHMQ
ALPPR**
X4 linker
(DNA)
(SEQ ID NO: 682)
gacaagacgcacaccaagccacctaaaccagctccagaactgctcggaggtcctggcaccggaaccggaggacctaccatc
aaaccacctaagccacctaagcctgctcctaacctgctcggaggacct
(amino acids)
(SEQ ID NO: 683)
DKTHTKPPKPAPELLGGPGTGTGGPTIKPPKPPKPAPNLLGGP
C2 CAR X4 linker
(DNA)
(SEQ ID NO: 684)
gaggtgcagctggtggagtctgggggaggcctggtcaagcctggggggtccctgagactctcctgtgcagcctctggattc
accttcagtggctatgccatgagctgggtccgccaggctccagggaaggggctggagtgggtctcaaccattagtagtggc
ggaacctacatatactaccccgactcagtgaagggccgattcaccatctccagagacaacgccaagaactcactgtatctg
caaatgaacagcctgagagccgaggacacggccgtgtattactgtgcgagacttgggggggataattactacgaatacttc
gatgtctggggcaaagggaccacggtcaccgtctcctccggcggtggcggatccggcggtggcggatccggcggtggcgga
tccgacattgtgctgacccagtctccagcctccttggccgtgtctccaggacagagggccaccatcacctgcagagccagt
aagagtgtcagtaccagcggatactcctacatgcactggtatcagcagaaaccaggacaacctcctaaactcctgatttac
ctggcatccaatctggagagcggggtcccagccaggttcagcggcagtgggtctgggaccgatttcaccctcacaattaat
cctgtggaagctaatgatactgcaaattattactgtcagcacagtagggagctgcctttcacattcggcggagggaccaag
gtggagatcaaacgaactgacaagacgcacaccaagccacctaaaccagctccagaactgctcggaggtcctggcaccgga
accggaggacctaccatcaaaccacctaagccacctaagcctgctcctaacctgctcggaggacctatctacatctgggcg
cccttggccgggacttgtggggtccttctcctgtcactggttatcaccctttactgcaaacggggcagaaagaaactcctg
tatatattcaaacaaccatttatgagaccagtacaaactactcaagaggaagatggctgtagctgccgatttccagaagaa
gaagaaggaggatgtgaactgagagtgaagttcagcaggagcgcagacgcccccgcgtacaagcagggccagaaccagctc
tataacgagctcaatctaggacgaagagaggagtacgatgttttggacaagagacgtggccgggaccctgagatgggggga
aagccgagaaggaagaaccctcaggaaggcctgtacaatgaactgcagaaagataagatggcggaggcctacagtgagatt
gggatgaaaggcgagcgccggaggggcaaggggcacgatggcctttaccagggtctcagtacagccaccaaggacacctac
gacgcccttcacatgcaggccctgccccctcgctgataa
(amino acids)
(SEQ ID NO: 685)
EVQLVESGGGLVKPGGSLRLSCAASGFTFSGYAMSWVRQAPGKGLEWVSTISSGGTYIYYPDSVKGRFTISRDNAKNSLY
LQMNSLRAEDTAVYYCARLGGDNYYEYFDVWGKGTTVTVSSGGGGSGGGGSGGGGSDIVLTQSPASLAVSPGQRATITCR
ASKSVSTSGYSYMHWYQQKPGQPPKLLIYLASNLESGVPARFSGSGSGTDFTLTINPVEANDTANYYCQHSRELPFTFGG
GTKVEIKRTDKTHTKPPKPAPELLGGPGTGTGGPTIKPPKPPKPAPNLLGGPIYIWAPLAGTCGVLLLSLVITLYCKRGR
KKLLYIFKQPFMRPVQTTQEEDGCSCRFPEEEEGGCELRVKFSRSADAPAYKQGQNQLYNELNLGRREEYDVLDKRRGRD
PEMGGKPRRKNPQEGLYNELQKDKMAEAYSEIGMKGERRRGKGHDGLYQGLSTATKDTYDALHMQALPPR**
OKT3 scFv
(DNA)
(SEQ ID NO: 686)
caggtgcagctggtgcagagcggaggcggagtggtgcagcctggaagaagcctgcgcctgagctgcaaagcgagcggctat
acctttacccgctataccatgcattgggtgcgccaggcgccgggcaaaggcctggaatggattggctatattaacccgagc
cgcggctataccaactataaccagaaagtgaaagatcgctttaccattagcaccgataaaagcaaaagcaccgcgtttctg
cagatggatagcctgcgcccggaagataccgcggtgtattattgcgcgcgctattatgatgatcattattgcctggattat
tggggccagggcaccaccctgaccgtgagcagcggcggtggcggatccggcggtggcggatccggcggtggcggatccgat
attcagatgacccagagcccgagcagcctgagcgcgagcgtgggcgatcgcgtgaccattacctgcagcgcgagcagcagc
gtgagctatatgaactggtatcagcagaccccgggcaaagcgccgaaacgctggatttatgataccagcaaactggcgagc
ggcgtgccgagccgctttagcggcagcggcagcggcaccgattatacctttaccattagcagcctgcagccggaagatatt
gcgacctattattgccagcagtggagcagcaacccgtttacctttggccagggcaccaaactgcagattacccgctgataa
(amino acids)
(SEQ ID NO: 687)
QVQLVQSGGGVVQPGRSLRLSCKASGYTFTRYTMHWVRQAPGKGLEWIGYINPSRGYTNYNQKVKDRFTISTDKSKSTAF
LQMDSLRPEDTAVYYCARYYDDHYCLDYWGQGTTLTVSSGGGGSGGGGSGGGGSDIQMTQSPSSLSASVGDRVTITCSAS
SSVSYMNWYQQTPGKAPKRWIYDTSKLASGVPSRFSGSGSGTDYTFTISSLQPEDIATYYCQQWSSNPFTFGQGTKLQIT
R**
C2-FC-OKT3
(DNA)
(SEQ ID NO: 688)
gaggtgcagctggtggagtctgggggaggcctggtcaagcctggggggtccctgagactctcctgtgcagcctctggattc
accttcagtggctatgccatgagctgggtccgccaggctccagggaaggggctggagtgggtctcaaccattagtagtggc
ggaacctacatatactaccccgactcagtgaagggccgattcaccatctccagagacaacgccaagaactcactgtatctg
caaatgaacagcctgagagccgaggacacggccgtgtattactgtgcgagacttgggggggataattactacgaatacttc
gatgtctggggcaaagggaccacggtcaccgtctcctccggcggtggcggatccggcggtggcggatccggcggtggcgga
tccgacattgtgctgacccagtctccagcctccttggccgtgtctccaggacagagggccaccatcacctgcagagccagt
aagagtgtcagtaccagcggatactcctacatgcactggtatcagcagaaaccaggacaacctcctaaactcctgatttac
ctggcatccaatctggagagcggggtcccagccaggttcagcggcagtgggtctgggaccgatttcaccctcacaattaat
cctgtggaagctaatgatactgcaaattattactgtcagcacagtagggagctgcctttcacattcggcggagggaccaag
gtggagatcaaacgaactgagcccaaatcttgtgacaaaactcacacatgcccaccgtgcccagcacctgaactcctgggg
ggaccgtcagtcttcctcttccccccaaaacccaaggacaccctcatgatctcccggacccctgaggtcacatgcgtggtg
gtggacgtgagccacgaagaccctgaggtcaagttcaactggtacgtggacggcgtggaggtgcataatgccaagacaaag
ccgcgggaggagcagtacaacagcacgtaccgtgtggtcagcgtcctcaccgtcctgcaccaggactggctgaatggcaag
gagtacaagtgcaaggtctccaacaaagccctcccagcccccatcgagaaaaccatctccaaagccaaagggcagccccga
gaaccacaggtgtacaccctgcccccatcccgggaggagatgaccaagaaccaggtcagcctgacctgcctggtcaaaggc
ttctatcccagcgacatcgccgtggagtgggagagcaatgggcagccggagaacaactacaagaccacgcctcccgtgctg
gactccgacggctccttcttcctctacagcaagctcaccgtggacaagagcaggtggcagcaggggaacgtcttctcatgc
tccgtgatgcatgaggctctgcacaaccactacacgcagaagagcctctccctgtctccgggtaaaggcggtggcggatcc
caggtgcagctggtgcagagcggaggcggagtggtgcagcctggaagaagcctgcgcctgagctgcaaagcgagcggctat
acctttacccgctataccatgcattgggtgcgccaggcgccgggcaaaggcctggaatggattggctatattaacccgagc
cgcggctataccaactataaccagaaagtgaaagatcgctttaccattagcaccgataaaagcaaaagcaccgcgtttctg
cagatggatagcctgcgcccggaagataccgcggtgtattattgcgcgcgctattatgatgatcattattgcctggattat
tggggccagggcaccaccctgaccgtgagcagcggcggtggcggatccggcggtggcggatccggcggtggcggatccgat
attcagatgacccagagcccgagcagcctgagcgcgagcgtgggcgatcgcgtgaccattacctgcagcgcgagcagcagc
gtgagctatatgaactggtatcagcagaccccgggcaaagcgccgaaacgctggatttatgataccagcaaactggcgagc
ggcgtgccgagccgctttagcggcagcggcagcggcaccgattatacctttaccattagcagcctgcagccggaagatatt
gcgacctattattgccagcagtggagcagcaacccgtttacctttggccagggcaccaaactgcagattacccgctgataa
(amino acids)
(SEQ ID NO: 689)
EVQLVESGGGLVKPGGSLRLSCAASGFTFSGYAMSWVRQAPGKGLEWVSTISSGGTYIYYPDSVKGRFTISRDNAKNSLY
LQMNSLRAEDTAVYYCARLGGDNYYEYFDVWGKGTTVTVSSGGGGSGGGGSGGGGSDIVLTQSPASLAVSPGQRATITCR
ASKSVSTSGYSYMHWYQQKPGQPPKLLIYLASNLESGVPARFSGSGSGTDFTLTINPVEANDTANYYCQHSRELPFTFGG
GTKVEIKRTEPKSCDKTHTCPPCPAPELLGGPSVFLFPPKPKDTLMISRTPEVTCVVVDVSHEDPEVKFNWYVDGVEVHN
AKTKPREEQYNSTYRVVSVLTVLHQDWLNGKEYKCKVSNKALPAPIEKTISKAKGQPREPQVYTLPPSREEMTKNQVSLT
CLVKGFYPSDIAVEWESNGQPENNYKTTPPVLDSDGSFFLYSKLTVDKSRWQQGNVFSCSVMHEALHNHYTQKSLSLSPG
KGGGGSQVQLVQSGGGVVQPGRSLRLSCKASGYTFTRYTMHWVRQAPGKGLEWIGYINPSRGYTNYNQKVKDRFTISTDK
SKSTAFLQMDSLRPEDTAVYYCARYYDDHYCLDYWGQGTTLTVSSGGGGSGGGGSGGGGSDIQMTQSPSSLSASVGDRVT
ITCSASSSVSYMNWYQQTPGKAPKRWIYDTSKLASGVPSRFSGSGSGTDYTFTISSLQPEDIATYYCQQWSSNPFTFGQG
TKLQITR**
C2-IgD/FC-OKT3
(DNA)
(SEQ ID NO: 690)
gaggtgcagctggtggagtctgggggaggcctggtcaagcctggggggtccctgagactctcctgtgcagcctctggattc
accttcagtggctatgccatgagctgggtccgccaggctccagggaaggggctggagtgggtctcaaccattagtagtggc
ggaacctacatatactaccccgactcagtgaagggccgattcaccatctccagagacaacgccaagaactcactgtatctg
caaatgaacagcctgagagccgaggacacggccgtgtattactgtgcgagacttgggggggataattactacgaatacttc
gatgtctggggcaaagggaccacggtcaccgtctcctccggcggtggcggatccggcggtggcggatccggcggtggcgga
tccgacattgtgctgacccagtctccagcctccttggccgtgtctccaggacagagggccaccatcacctgcagagccagt
aagagtgtcagtaccagcggatactcctacatgcactggtatcagcagaaaccaggacaacctcctaaactcctgatttac
ctggcatccaatctggagagcggggtcccagccaggttcagcggcagtgggtctgggaccgatttcaccctcacaattaat
cctgtggaagctaatgatactgcaaattattactgtcagcacagtagggagctgcctttcacattcggcggagggaccaag
gtggagatcaaacgaactgagtctccaaaggcacaggcctcctcagtgcccactgcacaaccccaagcagagggcagcctc
gccaaggcaaccacagccccagccaccacccgtaacacaggaagaggcggcgaagagaagaaaaaggagaaggagaaagag
gaacaagaagagagagagacaaagacaccagagcccaaatcttgtgacaaaactcacacatgcccaccgtgcccagcacct
gaactcctggggggaccgtcagtcttcctcttccccccaaaacccaaggacaccctcatgatctcccggacccctgaggtc
acatgcgtggtggtggacgtgagccacgaagaccctgaggtcaagttcaactggtacgtggacggcgtggaggtgcataat
gccaagacaaagccgcgggaggagcagtacaacagcacgtaccgtgtggtcagcgtcctcaccgtcctgcaccaggactgg
ctgaatggcaaggagtacaagtgcaaggtctccaacaaagccctcccagcccccatcgagaaaaccatctccaaagccaaa
gggcagccccgagaaccacaggtgtacaccctgcccccatcccgggaggagatgaccaagaaccaggtcagcctgacctgc
ctggtcaaaggcttctatcccagcgacatcgccgtggagtgggagagcaatgggcagccggagaacaactacaagaccacg
cctcccgtgctggactccgacggctccttcttcctctacagcaagctcaccgtggacaagagcaggtggcagcaggggaac
gtcttctcatgctccgtgatgcatgaggctctgcacaaccactacacgcagaagagcctctccctgtctccgggtaaaggc
ggtggcggatcccaggtgcagctggtgcagagcggaggcggagtggtgcagcctggaagaagcctgcgcctgagctgcaaa
gcgagcggctatacctttacccgctataccatgcattgggtgcgccaggcgccgggcaaaggcctggaatggattggctat
attaacccgagccgcggctataccaactataaccagaaagtgaaagatcgctttaccattagcaccgataaaagcaaaagc
accgcgtttctgcagatggatagcctgcgcccggaagataccgcggtgtattattgcgcgcgctattatgatgatcattat
tgcctggattattggggccagggcaccaccctgaccgtgagcagcggcggtggcggatccggcggtggcggatccggcggt
ggcggatccgatattcagatgacccagagcccgagcagcctgagcgcgagcgtgggcgatcgcgtgaccattacctgcagc
gcgagcagcagcgtgagctatatgaactggtatcagcagaccccgggcaaagcgccgaaacgctggatttatgataccagc
aaactggcgagcggcgtgccgagccgctttagcggcagcggcagcggcaccgattatacctttaccattagcagcctgcag
ccggaagatattgcgacctattattgccagcagtggagcagcaacccgtttacctttggccagggcaccaaactgcagatt
acccgctgataa
(amino acids)
(SEQ ID NO: 691)
EVQLVESGGGLVKPGGSLRLSCAASGFTFSGYAMSWVRQAPGKGLEWVSTISSGGTYIYYPDSVKGRFTISRDNAKNSLY
LQMNSLRAEDTAVYYCARLGGDNYYEYFDVWGKGTTVTVSSGGGGSGGGGSGGGGSDIVLTQSPASLAVSPGQRATITCR
ASKSVSTSGYSYMHWYQQKPGQPPKLLIYLASNLESGVPARFSGSGSGTDFTLTINPVEANDTANYYCQHSRELPFTFGG
GTKVEIKRTESPKAQASSVPTAQPQAEGSLAKATTAPATTRNTGRGGEEKKKEKEKEEQEERETKTPEPKSCDKTHTCPP
CPAPELLGGPSVFLFPPKPKDTLMISRTPEVTCVVVDVSHEDPEVKFNWYVDGVEVHNAKTKPREEQYNSTYRVVSVLTV
LHQDWLNGKEYKCKVSNKALPAPIEKTISKAKGQPREPQVYTLPPSREEMTKNQVSLTCLVKGFYPSDIAVEWESNGQPE
NNYKTTPPVLDSDGSFFLYSKLTVDKSRWQQGNVFSCSVMHEALHNHYTQKSLSLSPGKGGGGSQVQLVQSGGGVVQPGR
SLRLSCKASGYTFTRYTMHWVRQAPGKGLEWIGYINPSRGYTNYNQKVKDRFTISTDKSKSTAFLQMDSLRPEDTAVYYC
ARYYDDHYCLDYWGQGTTLTVSSGGGGSGGGGSGGGGSDIQMTQSPSSLSASVGDRVTITCSASSSVSYMNWYQQTPGKA
PKRWIYDTSKLASGVPSRFSGSGSGTDYTFTISSLQPEDIATYYCQQWSSNPFTFGQGTKLQITR**
C2-FCHingeless/Y407R-OKT3
(DNA)
(SEQ ID NO: 692)
gaggtgcagctggtggagtctgggggaggcctggtcaagcctggggggtccctgagactctcctgtgcagcctctggattc
accttcagtggctatgccatgagctgggtccgccaggctccagggaaggggctggagtgggtctcaaccattagtagtggc
ggaacctacatatactaccccgactcagtgaagggccgattcaccatctccagagacaacgccaagaactcactgtatctg
caaatgaacagcctgagagccgaggacacggccgtgtattactgtgcgagacttgggggggataattactacgaatacttc
gatgtctggggcaaagggaccacggtcaccgtctcctccggcggtggcggatccggcggtggcggatccggcggtggcgga
tccgacattgtgctgacccagtctccagcctccttggccgtgtctccaggacagagggccaccatcacctgcagagccagt
aagagtgtcagtaccagcggatactcctacatgcactggtatcagcagaaaccaggacaacctcctaaactcctgatttac
ctggcatccaatctggagagcggggtcccagccaggttcagcggcagtgggtctgggaccgatttcaccctcacaattaat
cctgtggaagctaatgatactgcaaattattactgtcagcacagtagggagctgcctttcacattcggcggagggaccaag
gtggagatcaaacgaactgcacctgaactcctggggggaccgtcagtcttcctcttccccccaaaacccaaggacaccctc
atgatctcccggacccctgaggtcacatgcgtggtggtggacgtgagccacgaagaccctgaggtcaagttcaactggtac
gtggacggcgtggaggtgcataatgccaagacaaagccgcgggaggagcagtacaacagcacgtaccgtgtggtcagcgtc
ctcaccgtcctgcaccaggactggctgaatggcaaggagtacaagtgcaaggtctccaacaaagccctcccagcccccatc
gagaaaaccatctccaaagccaaagggcagccccgagaaccacaggtgtacaccctgcccccatcccgggaggagatgacc
aagaaccaggtcagcctgacctgcctggtcaaaggcttctatcccagcgacatcgccgtggagtgggagagcaatgggcag
ccggagaacaactacaagaccacgcctcccgtgctggactccgacggctccttcttcctcaggagcaagctcaccgtggac
aagagcaggtggcagcaggggaacgtcttctcatgctccgtgatgcatgaggctctgcacaaccactacacgcagaagagc
ctctccctgtctccgggtaaaggcggtggcggatcccaggtgcagctggtgcagagcggaggcggagtggtgcagcctgga
agaagcctgcgcctgagctgcaaagcgagcggctatacctttacccgctataccatgcattgggtgcgccaggcgccgggc
aaaggcctggaatggattggctatattaacccgagccgcggctataccaactataaccagaaagtgaaagatcgctttacc
attagcaccgataaaagcaaaagcaccgcgtttctgcagatggatagcctgcgcccggaagataccgcggtgtattattgc
gcgcgctattatgatgatcattattgcctggattattggggccagggcaccaccctgaccgtgagcagcggcggtggcgga
tccggcggtggcggatccggcggtggcggatccgatattcagatgacccagagcccgagcagcctgagcgcgagcgtgggc
gatcgcgtgaccattacctgcagcgcgagcagcagcgtgagctatatgaactggtatcagcagaccccgggcaaagcgccg
aaacgctggatttatgataccagcaaactggcgagcggcgtgccgagccgctttagcggcagcggcagcggcaccgattat
acctttaccattagcagcctgcagccggaagatattgcgacctattattgccagcagtggagcagcaacccgtttaccttt
ggccagggcaccaaactgcagattacccgctgataa
(amino acids)
(SEQ ID NO: 693)
EVQLVESGGGLVKPGGSLRLSCAASGFTFSGYAMSWVRQAPGKGLEWVSTISSGGTYIYYPDSVKGRFTISRDNAKNSLY
LQMNSLRAEDTAVYYCARLGGDNYYEYFDVWGKGTTVTVSSGGGGSGGGGSGGGGSDIVLTQSPASLAVSPGQRATITCR
ASKSVSTSGYSYMHWYQQKPGQPPKLLIYLASNLESGVPARFSGSGSGTDFTLTINPVEANDTANYYCQHSRELPFTFGG
GTKVEIKRTAPELLGGPSVFLFPPKPKDTLMISRTPEVTCVVVDVSHEDPEVKFNWYVDGVEVHNAKTKPREEQYNSTYR
VVSVLTVLHQDWLNGKEYKCKVSNKALPAPIEKTISKAKGQPREPQVYTLPPSREEMTKNQVSLTCLVKGFYPSDIAVEW
ESNGQPENNYKTTPPVLDSDGSFFLRSKLTVDKSRWQQGNVFSCSVMHEALHNHYTQKSLSLSPGKGGGGSQVQLVQSGG
GVVQPGRSLRLSCKASGYTFTRYTMHWVRQAPGKGLEWIGYINPSRGYTNYNQKVKDRFTISTDKSKSTAFLQMDSLRPE
DTAVYYCARYYDDHYCLDYWGQGTTLTVSSGGGGSGGGGSGGGGSDIQMTQSPSSLSASVGDRVTITCSASSSVSYMNWY
QQTPGKAPKRWIYDTSKLASGVPSRFSGSGSGTDYTFTISSLQPEDIATYYCQQWSSNPFTFGQGTKLQITR**
C2-IgD/FCHingeless/Y407R-OKT3
(DNA)
(SEQ ID NO: 694)
gaggtgcagctggtggagtctgggggaggcctggtcaagcctggggggtccctgagactctcctgtgcagcctctggattc
accttcagtggctatgccatgagctgggtccgccaggctccagggaaggggctggagtgggtctcaaccattagtagtggc
ggaacctacatatactaccccgactcagtgaagggccgattcaccatctccagagacaacgccaagaactcactgtatctg
caaatgaacagcctgagagccgaggacacggccgtgtattactgtgcgagacttgggggggataattactacgaatacttc
gatgtctggggcaaagggaccacggtcaccgtctcctccggcggtggcggatccggcggtggcggatccggcggtggcgga
tccgacattgtgctgacccagtctccagcctccttggccgtgtctccaggacagagggccaccatcacctgcagagccagt
aagagtgtcagtaccagcggatactcctacatgcactggtatcagcagaaaccaggacaacctcctaaactcctgatttac
ctggcatccaatctggagagcggggtcccagccaggttcagcggcagtgggtctgggaccgatttcaccctcacaattaat
cctgtggaagctaatgatactgcaaattattactgtcagcacagtagggagctgcctttcacattcggcggagggaccaag
gtggagatcaaacgaactgagtctccaaaggcacaggcctcctcagtgcccactgcacaaccccaagcagagggcagcctc
gccaaggcaaccacagccccagccaccacccgtaacacaggaagaggcggcgaagagaagaaaaaggagaaggagaaagag
gaacaagaagagagagagacaaagacaccagcacctgaactcctggggggaccgtcagtcttcctcttccccccaaaaccc
aaggacaccctcatgatctcccggacccctgaggtcacatgcgtggtggtggacgtgagccacgaagaccctgaggtcaag
ttcaactggtacgtggacggcgtggaggtgcataatgccaagacaaagccgcgggaggagcagtacaacagcacgtaccgt
gtggtcagcgtcctcaccgtcctgcaccaggactggctgaatggcaaggagtacaagtgcaaggtctccaacaaagccctc
ccagcccccatcgagaaaaccatctccaaagccaaagggcagccccgagaaccacaggtgtacaccctgcccccatcccgg
gaggagatgaccaagaaccaggtcagcctgacctgcctggtcaaaggcttctatcccagcgacatcgccgtggagtgggag
agcaatgggcagccggagaacaactacaagaccacgcctcccgtgctggactccgacggctccttcttcctcaggagcaag
ctcaccgtggacaagagcaggtggcagcaggggaacgtcttctcatgctccgtgatgcatgaggctctgcacaaccactac
acgcagaagagcctctccctgtctccgggtaaaggcggtggcggatcccaggtgcagctggtgcagagcggaggcggagtg
gtgcagcctggaagaagcctgcgcctgagctgcaaagcgagcggctatacctttacccgctataccatgcattgggtgcgc
caggcgccgggcaaaggcctggaatggattggctatattaacccgagccgcggctataccaactataaccagaaagtgaaa
gatcgctttaccattagcaccgataaaagcaaaagcaccgcgtttctgcagatggatagcctgcgcccggaagataccgcg
gtgtattattgcgcgcgctattatgatgatcattattgcctggattattggggccagggcaccaccctgaccgtgagcagc
ggcggtggcggatccggcggtggcggatccggcggtggcggatccgatattcagatgacccagagcccgagcagcctgagc
gcgagcgtgggcgatcgcgtgaccattacctgcagcgcgagcagcagcgtgagctatatgaactggtatcagcagaccccg
ggcaaagcgccgaaacgctggatttatgataccagcaaactggcgagcggcgtgccgagccgctttagcggcagcggcagc
ggcaccgattatacctttaccattagcagcctgcagccggaagatattgcgacctattattgccagcagtggagcagcaac
ccgtttacctttggccagggcaccaaactgcagattacccgctgataa
(amino acids)
(SEQ ID NO: 695)
EVQLVESGGGLVKPGGSLRLSCAASGFTFSGYAMSWVRQAPGKGLEWVSTISSGGTYIYYPDSVKGRFTISRDNAKNSLYL
QMNSLRAEDTAVYYCARLGGDNYYEYFDVWGKGTTVTVSSGGGGSGGGGSGGGGSDIVLTQSPASLAVSPGQRATITCRAS
KSVSTSGYSYMHWYQQKPGQPPKLLIYLASNLESGVPARFSGSGSGTDFTLTINPVEANDTANYYCQHSRELPFTFGGGTK
VEIKRTESPKAQASSVPTAQPQAEGSLAKATTAPATTRNTGRGGEEKKKEKEKEEQEERETKTPAPELLGGPSVFLFPPKP
KDTLMISRTPEVTCVVVDVSHEDPEVKFNWYVDGVEVHNAKTKPREEQYNSTYRVVSVLTVLHQDWLNGKEYKCKVSNKAL
PAPIEKTISKAKGQPREPQVYTLPPSREEMTKNQVSLTCLVKGFYPSDIAVEWESNGQPENNYKTTPPVLDSDGSFFLRSK
LTVDKSRWQQGNVFSCSVMHEALHNHYTQKSLSLSPGKGGGGSQVQLVQSGGGVVQPGRSLRLSCKASGYTFTRYTMHWVR
QAPGKGLEWIGYINPSRGYTNYNQKVKDRFTISTDKSKSTAFLQMDSLRPEDTAVYYCARYYDDHYCLDYWGQGTTLTVSS
GGGGSGGGGSGGGGSDIQMTQSPSSLSASVGDRVTITCSASSSVSYMNWYQQTPGKAPKRWIYDTSKLASGVPSRFSGSGS
GTDYTFTISSLQPEDIATYYCQQWSSNPFTFGQGTKLQITR**
C2-IgD-OKT3
(DNA)
(SEQ ID NO: 696)
gaggtgcagctggtggagtctgggggaggcctggtcaagcctggggggtccctgagactctcctgtgcagcctctggattc
accttcagtggctatgccatgagctgggtccgccaggctccagggaaggggctggagtgggtctcaaccattagtagtggc
ggaacctacatatactaccccgactcagtgaagggccgattcaccatctccagagacaacgccaagaactcactgtatctg
caaatgaacagcctgagagccgaggacacggccgtgtattactgtgcgagacttgggggggataattactacgaatacttc
gatgtctggggcaaagggaccacggtcaccgtctcctccggcggtggcggatccggcggtggcggatccggcggtggcgga
tccgacattgtgctgacccagtctccagcctccttggccgtgtctccaggacagagggccaccatcacctgcagagccagt
aagagtgtcagtaccagcggatactcctacatgcactggtatcagcagaaaccaggacaacctcctaaactcctgatttac
ctggcatccaatctggagagcggggtcccagccaggttcagcggcagtgggtctgggaccgatttcaccctcacaattaat
cctgtggaagctaatgatactgcaaattattactgtcagcacagtagggagctgcctttcacattcggcggagggaccaag
gtggagatcaaacgaactgagtctccaaaggcacaggcctcctcagtgcccactgcacaaccccaagcagagggcagcctc
gccaaggcaaccacagccccagccaccacccgtaacacaggaagaggcggcgaagagaagaaaaaggagaaggagaaagag
gaacaagaagagagagagacaaagacaccaggcggtggcggatcccaggtgcagctggtgcagagcggaggcggagtggtg
cagcctggaagaagcctgcgcctgagctgcaaagcgagcggctatacctttacccgctataccatgcattgggtgcgccag
gcgccgggcaaaggcctggaatggattggctatattaacccgagccgcggctataccaactataaccagaaagtgaaagat
cgctttaccattagcaccgataaaagcaaaagcaccgcgtttctgcagatggatagcctgcgcccggaagataccgcggtg
tattattgcgcgcgctattatgatgatcattattgcctggattattggggccagggcaccaccctgaccgtgagcagcggc
ggtggcggatccggcggtggcggatccggcggtggcggatccgatattcagatgacccagagcccgagcagcctgagcgcg
agcgtgggcgatcgcgtgaccattacctgcagcgcgagcagcagcgtgagctatatgaactggtatcagcagaccccgggc
aaagcgccgaaacgctggatttatgataccagcaaactggcgagcggcgtgccgagccgctttagcggcagcggcagcggc
accgattatacctttaccattagcagcctgcagccggaagatattgcgacctattattgccagcagtggagcagcaacccg
tttacctttggccagggcaccaaactgcagattacccgctgataa
(amino acids)
(SEQ ID NO: 697)
EVQLVESGGGLVKPGGSLRLSCAASGFTFSGYAMSWVRQAPGKGLEWVSTISSGGTYIYYPDSVKGRFTISRDNAKNSLY
LQMNSLRAEDTAVYYCARLGGDNYYEYFDVWGKGTTVTVSSGGGGSGGGGSGGGGSDIVLTQSPASLAVSPGQRATITCR
ASKSVSTSGYSYMHWYQQKPGQPPKLLIYLASNLESGVPARFSGSGSGTDFTLTINPVEANDTANYYCQHSRELPFTFGG
GTKVEIKRTESPKAQASSVPTAQPQAEGSLAKATTAPATTRNTGRGGEEKKKEKEKEEQEERETKTPGGGGSQVQLVQSG
GGVVQPGRSLRLSCKASGYTFTRYTMHWVRQAPGKGLEWIGYINPSRGYTNYNQKVKDRFTISTDKSKSTAFLQMDSLRP
EDTAVYYCARYYDDHYCLDYWGQGTTLTVSSGGGGSGGGGSGGGGSDIQMTQSPSSLSASVGDRVTITCSASSSVSYMNW
YQQTPGKAPKRWIYDTSKLASGVPSRFSGSGSGTDYTFTISSLQPEDIATYYCQQWSSNPFTFGQGTKLQITR**
C2-X4-OKT3
(DNA)
(SEQ ID NO: 698)
gaggtgcagctggtggagtctgggggaggcctggtcaagcctggggggtccctgagactctcctgtgcagcctctggattc
accttcagtggctatgccatgagctgggtccgccaggctccagggaaggggctggagtgggtctcaaccattagtagtggc
ggaacctacatatactaccccgactcagtgaagggccgattcaccatctccagagacaacgccaagaactcactgtatctg
caaatgaacagcctgagagccgaggacacggccgtgtattactgtgcgagacttgggggggataattactacgaatacttc
gatgtctggggcaaagggaccacggtcaccgtctcctccggcggtggcggatccggcggtggcggatccggcggtggcgga
tccgacattgtgctgacccagtctccagcctccttggccgtgtctccaggacagagggccaccatcacctgcagagccagt
aagagtgtcagtaccagcggatactcctacatgcactggtatcagcagaaaccaggacaacctcctaaactcctgatttac
ctggcatccaatctggagagcggggtcccagccaggttcagcggcagtgggtctgggaccgatttcaccctcacaattaat
cctgtggaagctaatgatactgcaaattattactgtcagcacagtagggagctgcctttcacattcggcggagggaccaag
gtggagatcaaacgaactgacaagacgcacaccaagccacctaaaccagctccagaactgctcggaggtcctggcaccgga
accggaggacctaccatcaaaccacctaagccacctaagcctgctcctaacctgctcggaggacctggcggtggcggatcc
caggtgcagctggtgcagagcggaggcggagtggtgcagcctggaagaagcctgcgcctgagctgcaaagcgagcggctat
acctttacccgctataccatgcattgggtgcgccaggcgccgggcaaaggcctggaatggattggctatattaacccgagc
cgcggctataccaactataaccagaaagtgaaagatcgctttaccattagcaccgataaaagcaaaagcaccgcgtttctg
cagatggatagcctgcgcccggaagataccgcggtgtattattgcgcgcgctattatgatgatcattattgcctggattat
tggggccagggcaccaccctgaccgtgagcagcggcggtggcggatccggcggtggcggatccggcggtggcggatccgat
attcagatgacccagagcccgagcagcctgagcgcgagcgtgggcgatcgcgtgaccattacctgcagcgcgagcagcagc
gtgagctatatgaactggtatcagcagaccccgggcaaagcgccgaaacgctggatttatgataccagcaaactggcgagc
ggcgtgccgagccgctttagcggcagcggcagcggcaccgattatacctttaccattagcagcctgcagccggaagatatt
gcgacctattattgccagcagtggagcagcaacccgtttacctttggccagggcaccaaactgcagattacccgctgataa
(amino acids)
(SEQ ID NO: 699)
EVQLVESGGGLVKPGGSLRLSCAASGFTFSGYAMSWVRQAPGKGLEWVSTISSGGTYIYYPDSVKGRFTISRDNAKNSLY
LQMNSLRAEDTAVYYCARLGGDNYYEYFDVWGKGTTVTVSSGGGGSGGGGSGGGGSDIVLTQSPASLAVSPGQRATITCR
ASKSVSTSGYSYMHWYQQKPGQPPKLLIYLASNLESGVPARFSGSGSGTDFTLTINPVEANDTANYYCQHSRELPFTFGG
GTKVEIKRTDKTHTKPPKPAPELLGGPGTGTGGPTIKPPKPPKPAPNLLGGPGGGGSQVQLVQSGGGVVQPGRSLRLSCK
ASGYTFTRYTMHWVRQAPGKGLEWIGYINPSRGYTNYNQKVKDRFTISTDKSKSTAFLQMDSLRPEDTAVYYCARYYDDH
YCLDYWGQGTTLTVSSGGGGSGGGGSGGGGSDIQMTQSPSSLSASVGDRVTITCSASSSVSYMNWYQQTPGKAPKRWIYD
TSKLASGVPSRFSGSGSGTDYTFTISSLQPEDIATYYCQQWSSNPFTFGQGTKLQITR**
C2-MMP9
(DNA)
(SEQ ID NO: 700)
gaggtgcagctggtggagtctgggggaggcctggtcaagcctggggggtccctgagactctcctgtgcagcctctggattc
accttcagtggctatgccatgagctgggtccgccaggctccagggaaggggctggagtgggtctcaaccattagtagtggc
ggaacctacatatactaccccgactcagtgaagggccgattcaccatctccagagacaacgccaagaactcactgtatctg
caaatgaacagcctgagagccgaggacacggccgtgtattactgtgcgagacttgggggggataattactacgaatacttc
gatgtctggggcaaagggaccacggtcaccgtctcctccggcggtggcggatccggcggtggcggatccggcggtggcgga
tccgacattgtgctgacccagtctccagcctccttggccgtgtctccaggacagagggccaccatcacctgcagagccagt
aagagtgtcagtaccagcggatactcctacatgcactggtatcagcagaaaccaggacaacctcctaaactcctgatttac
ctggcatccaatctggagagcggggtcccagccaggttcagcggcagtgggtctgggaccgatttcaccctcacaattaat
cctgtggaagctaatgatactgcaaattattactgtcagcacagtagggagctgcctttcacattcggcggagggaccaag
gtggagatcaaacgaactggcggtggcggatccagcctctggcagcccctggtcctggtgctcctggtgctgggctgctgc
tttgctgcccccagacagcgccagtccacccttgtgctcttccctggagacctgagaaccaatctcaccgacaggcagctg
gcagaggaatacctgtaccgctatggttacactcgggtggcagagatgcgtggagagtcgaaatctctggggcctgcgctg
ctgcttctccagaagcaactgtccctgcccgagaccggtgagctggatagcgccacgctgaaggccatgcgaaccccacgg
tgcggggtcccagacctgggcagattccaaacctttgagggcgacctcaagtggcaccaccacaacatcacctattggatc
caaaactactcggaagacttgccgcgggcggtgattgacgacgcctttgcccgcgccttcgcactgtggagcgcggtgacg
ccgctcaccttcactcgcgtgtacagccgggacgcagacatcgtcatccagtttggtgtcgcggagcacggagacgggtat
cccttcgacgggaaggacgggctcctggcacacgcctttcctcctggccccggcattcagggagacgcccatttcgacgat
gacgagttgtggtccctgggcaagggcgtcgtggttccaactcggtttggaaacgcagatggcgcggcctgccacttcccc
ttcatcttcgagggccgctcctactctgcctgcaccaccgacggtcgctccgacggcttgccctggtgcagtaccacggcc
aactacgacaccgacgaccggtttggcttctgccccagcgagagactctacacccaggacggcaatgctgatgggaaaccc
tgccagtttccattcatcttccaaggccaatcctactccgcctgcaccacggacggtcgctccgacggctaccgctggtgc
gccaccaccgccaactacgaccgggacaagctcttcggcttctgcccgacccgagctgactcgacggtgatggggggcaac
tcggcgggggagctgtgcgtcttccccttcactttcctgggtaaggagtactcgacctgtaccagcgagggccgcggagat
gggcgcctctggtgcgctaccacctcgaactttgacagcgacaagaagtggggcttctgcccggaccaaggatacagtttg
ttcctcgtggcggcgcatgagttcggccacgcgctgggcttagatcattcctcagtgccggaggcgctcatgtaccctatg
taccgcttcactgaggggccccccttgcataaggacgacgtgaatggcatccggcacctctatggtcctcgccctgaacct
gagccacggcctccaaccaccaccacaccgcagcccacggctcccccgacggtctgccccaccggaccccccactgtccac
ccctcagagcgccccacagctggccccacaggtcccccctcagctggccccacaggtccccccactgctggcccttctacg
gccactactgtgcctttgagtccggtggacgatgcctgcaacgtgaacatcttcgacgccatcgcggagattgggaaccag
ctgtatttgttcaaggatgggaagtactggcgattctctgagggcagggggagccggccgcagggccccttccttatcgcc
gacaagtggcccgcgctgccccgcaagctggactcggtctttgaggagcggctctccaagaagcttttcttcttctctggg
cgccaggtgtgggtgtacacaggcgcgtcggtgctgggcccgaggcgtctggacaagctgggcctgggagccgacgtggcc
caggtgaccggggccctccggagtggcagggggaagatgctgctgttcagcgggcggcgcctctggaggttcgacgtgaag
gcgcagatggtggatccccggagcgccagcgaggtggaccggatgttccccggggtgcctttggacacgcacgacgtcttc
cagtaccgagagaaagcctatttctgccaggaccgcttctactggcgcgtgagttcccggagtgagttgaaccaggtggac
caagtgggctacgtgacctatgacatcctgcagtgccctgaggacgattacaaggatgacgacgataagtgataa
(amino acids)
(SEQ ID NO: 701)
EVQLVESGGGLVKPGGSLRLSCAASGFTFSGYAMSWVRQAPGKGLEWVSTISSGGTYIYYPDSVKGRFTISRDNAKNSLY
LQMNSLRAEDTAVYYCARLGGDNYYEYFDVWGKGTTVTVSSGGGGSGGGGSGGGGSDIVLTQSPASLAVSPGQRATITCR
ASKSVSTSGYSYMHWYQQKPGQPPKLLIYLASNLESGVPARFSGSGSGTDFTLTINPVEANDTANYYCQHSRELPFTFGG
GTKVEIKRTGGGGSSLWQPLVLVLLVLGCCFAAPRQRQSTLVLFPGDLRTNLTDRQLAEEYLYRYGYTRVAEMRGESKSL
GPALLLLQKQLSLPETGELDSATLKAMRTPRCGVPDLGRFQTFEGDLKWHHHNITYWIQNYSEDLPRAVIDDAFARAFAL
WSAVTPLTFTRVYSRDADIVIQFGVAEHGDGYPFDGKDGLLAHAFPPGPGIQGDAHFDDDELWSLGKGVVVPTRFGNADG
AACHFPFIFEGRSYSACTTDGRSDGLPWCSTTANYDTDDRFGFCPSERLYTQDGNADGKPCQFPFIFQGQSYSACTTDGR
SDGYRWCATTANYDRDKLFGFCPTRADSTVMGGNSAGELCVFPFTFLGKEYSTCTSEGRGDGRLWCATTSNFDSDKKWGF
CPDQGYSLFLVAAHEFGHALGLDHSSVPEALMYPMYRFTEGPPLHKDDVNGIRHLYGPRPEPEPRPPTTTTPQPTAPPTV
CPTGPPTVHPSERPTAGPTGPPSAGPTGPPTAGPSTATTVPLSPVDDACNVNIFDAIAEIGNQLYLFKDGKYWRFSEGRG
SRPQGPFLIADKWPALPRKLDSVFEERLSKKLFFFSGRQVWVYTGASVLGPRRLDKLGLGADVAQVTGALRSGRGKMLLF
SGRRLWRFDVKAQMVDPRSASEVDRMFPGVPLDTHDVFQYREKAYFCQDRFYWRVSSRSELNQVDQVGYVTYDILQCPED
DYKDDDDK**
C2-MMP9cat
(DNA)
(SEQ ID NO: 702)
gaggtgcagctggtggagtctgggggaggcctggtcaagcctggggggtccctgagactctcctgtgcagcctctggattc
accttcagtggctatgccatgagctgggtccgccaggctccagggaaggggctggagtgggtctcaaccattagtagtggc
ggaacctacatatactaccccgactcagtgaagggccgattcaccatctccagagacaacgccaagaactcactgtatctg
caaatgaacagcctgagagccgaggacacggccgtgtattactgtgcgagacttgggggggataattactacgaatacttc
gatgtctggggcaaagggaccacggtcaccgtctcctccggcggtggcggatccggcggtggcggatccggcggtggcgga
tccgacattgtgctgacccagtctccagcctccttggccgtgtctccaggacagagggccaccatcacctgcagagccagt
aagagtgtcagtaccagcggatactcctacatgcactggtatcagcagaaaccaggacaacctcctaaactcctgatttac
ctggcatccaatctggagagcggggtcccagccaggttcagcggcagtgggtctgggaccgatttcaccctcacaattaat
cctgtggaagctaatgatactgcaaattattactgtcagcacagtagggagctgcctttcacattcggcggagggaccaag
gtggagatcaaacgaactggcggtggcggatccttccaaacctttgagggcgacctcaagtggcaccaccacaacatcacc
tattggatccaaaactactcggaagacttgccgcgggcggtgattgacgacgcctttgcccgcgccttcgcactgtggagc
gcggtgacgccgctcaccttcactcgcgtgtacagccgggacgcagacatcgtcatccagtttggtgtcgcggagcacgga
gacgggtatcccttcgacgggaaggacgggctcctggcacacgcctttcctcctggccccggcattcagggagacgcccat
ttcgacgatgacgagttgtggtccctgggcaagggcgtcgtggttccaactcggtttggaaacgcagatggcgcggcctgc
cacttccccttcatcttcgagggccgctcctactctgcctgcaccaccgacggtcgctccgacggcttgccctggtgcagt
accacggccaactacgacaccgacgaccggtttggcttctgccccagcgagagactctacacccaggacggcaatgctgat
gggaaaccctgccagtttccattcatcttccaaggccaatcctactccgcctgcaccacggacggtcgctccgacggctac
cgctggtgcgccaccaccgccaactacgaccgggacaagctcttcggcttctgcccgacccgagctgactcgacggtgatg
gggggcaactcggcgggggagctgtgcgtcttccccttcactttcctgggtaaggagtactcgacctgtaccagcgagggc
cgcggagatgggcgcctctggtgcgctaccacctcgaactttgacagcgacaagaagtggggcttctgcccggaccaagga
tacagtttgttcctcgtggcggcgcatgagttcggccacgcgctgggcttagatcattcctcagtgccggaggcgctcatg
taccctatgtaccgcttcactgaggggccccccttgcataaggacgacgtgaatggcatccggcacctctatggtcctcgc
cctgaacctgattacaaggatgacgacgataagtgataa
(amino acids)
(SEQ ID NO: 703)
EVQLVESGGGLVKPGGSLRLSCAASGFTFSGYAMSWVRQAPGKGLEWVSTISSGGTYIYYPDSVKGRFTISRDNAKNSLY
LQMNSLRAEDTAVYYCARLGGDNYYEYFDVWGKGTTVTVSSGGGGSGGGGSGGGGSDIVLTQSPASLAVSPGQRATITCR
ASKSVSTSGYSYMHWYQQKPGQPPKLLIYLASNLESGVPARFSGSGSGTDFTLTINPVEANDTANYYCQHSRELPFTFGG
GTKVEIKRTGGGGSFQTFEGDLKWHHHNITYWIQNYSEDLPRAVIDDAFARAFALWSAVTPLTFTRVYSRDADIVIQFGV
AEHGDGYPFDGKDGLLAHAFPPGPGIQGDAHFDDDELWSLGKGVVVPTRFGNADGAACHFPFIFEGRSYSACTTDGRSDG
LPWCSTTANYDTDDRFGFCPSERLYTQDGNADGKPCQFPFIFQGQSYSACTTDGRSDGYRWCATTANYDRDKLFGFCPTR
ADSTVMGGNSAGELCVFPFTFLGKEYSTCTSEGRGDGRLWCATTSNFDSDKKWGFCPDQGYSLFLVAAHEFGHALGLDHS
SVPEALMYPMYRFTEGPPLHKDDVNGIRHLYGPRPEPDYK
DDDDK**
Other linkers for BiTES between two scFvs and between C2 and MMP9 include but
are not limited to those shown as SEQ ID NOS: 705, 707, 709, 711, 713, 715 and
717.
[G₄S₁]x2 linker sequence:
(DNA)
(SEQ ID NO: 704)
ggcggtggcggatccggcggtggcggatcc
(amino acids)
(SEQ ID NO: 705)
GGGGSGGGGS
[G₄S₁]x3 linker sequence:
(DNA)
(SEQ ID NO: 706)
ggcggtggcggatccggcggtggcggatccggcggtggcggatcc
(amino acids)
(SEQ ID NO: 707)
GGGGSGGGGSGGGGS
Long GS linker sequence:
(DNA)
(SEQ ID NO: 708)
ggcggtggaagcggcggtggcggatccggcagcggcggaagcggcggtggcggatccggcggtgga
(amino acids)
(SEQ ID NO: 709)
GGGSGGGGSGSGGSGGGGSGGG
13 aa GS linker sequence:
(DNA)
(SEQ ID NO: 710)
ggcggtggatccggcggtggcggatccggcggtggatcc
(amino acids)
(SEQ ID NO: 711)
GGGSGGGGSGGGS
8 aa GS linker sequence:
(DNA)
(SEQ ID NO: 712)
ggcggttccggcggtggatccgga
(amino acids)
(SEQ ID NO: 713)
GGSGGGSG
12 aa GS linker sequence:
(DNA)
(SEQ ID NO: 714)
ggcggttccggcggtggatccggcggtggcggatccgga
(amino acids)
(SEQ ID NO: 715)
GGSGGGSGGGSG
24 aa GS linker sequence:
(DNA)
(SEQ ID NO: 716)
ggcggttccggcggtggatccggcggtggcggatccggaggcggttccggcggtggatccggcggtggcggatccgga
(amino acids)
(SEQ ID NO: 717)
GGSGGGSGGGSGGGSGGGSGGGSG
CAR-T C2 CD8/CD8/4-1BB/CD3z #44
N-CD8ls-huMNC2scFv-CD8ecd fragment- CD8 transmembrane- 4-1BB- CD3zeta-C
(DNA)
(SEQ ID NO: 718)
atggccttaccagtgaccgccttgctcctgccgctggccttgctgctccacgccgccaggccggaggtgcagctggtgga
gtctgggggaggcctggtcaagcctggggggtccctgagactctcctgtgcagcctctggattcaccttcagtggctatg
ccatgagctgggtccgccaggctccagggaaggggctggagtgggtctcaaccattagtagtggcggaacctacatatac
taccccgactcagtgaagggccgattcaccatctccagagacaacgccaagaactcactgtatctgcaaatgaacagcct
gagagccgaggacacggccgtgtattactgtgcgagacttgggggggataattactacgaatacttcgatgtctggggca
aagggaccacggtcaccgtctcctccggcggtggcggatccggcggtggcggatccggcggtggcggatccgacattgtg
ctgacccagtctccagcctccttggccgtgtctccaggacagagggccaccatcacctgcagagccagtaagagtgtcag
taccagcggatactcctacatgcactggtatcagcagaaaccaggacaacctcctaaactcctgatttacctggcatcca
atctggagagcggggtcccagccaggttcagcggcagtgggtctgggaccgatttcaccctcacaattaatcctgtggaa
gctaatgatactgcaaattattactgtcagcacagtagggagctgcctttcacattcggcggagggaccaaggtggagat
caaacgaactacaacaacccctgcccccagacctcctaccccagcccctacaattgccagccagcctctgagcctgaggc
ccgaggcttgtagacctgctgctggcggagccgtgcacaccagaggactggatttcgcctgcgacatctacatctgggcg
cccttggccgggacttgtggggtccttctcctgtcactggttatcaccctttactgcaaacggggcagaaagaaactcct
gtatatattcaaacaaccatttatgagaccagtacaaactactcaagaggaagatggctgtagctgccgatttccagaag
aagaagaaggaggatgtgaactgagagtgaagttcagcaggagcgcagacgcccccgcgtacaagcagggccagaaccag
ctctataacgagctcaatctaggacgaagagaggagtacgatgttttggacaagagacgtggccgggaccctgagatggg
gggaaagccgagaaggaagaaccctcaggaaggcctgtacaatgaactgcagaaagataagatggcggaggcctacagtg
agattgggatgaaaggcgagcgccggaggggcaaggggcacgatggcctttaccagggtctcagtacagccaccaaggac
acctacgacgcccttcacatgcaggccctgccccctcgctgataa
(amino acids)
(SEQ ID NO: 719)
MALPVTALLLPLALLLHAARPEVQLVESGGGLVKPGGSLRLSCAASGFTFSGYAMSWVRQAPGKGLEWVSTISSGGTYIY
YPDSVKGRFTISRDNAKNSLYLQMNSLRAEDTAVYYCARLGGDNYYEYFDVWGKGTTVTVSSGGGGSGGGGSGGGGSDIV
LTQSPASLAVSPGQRATITCRASKSVSTSGYSYMHWYQQKPGQPPKLLIYLASNLESGVPARFSGSGSGTDFTLTINPVE
ANDTANYYCQHSRELPFTFGGGTKVEIKRTTTTPAPRPPTPAPTIASQPLSLRPEACRPAAGGAVHTRGLDFACDIYIWA
PLAGTCGVLLLSLVITLYCKRGRKKLLYIFKQPFMRPVQTTQEEDGCSCRFPEEEEGGCELRVKFSRSADAPAYKQGQNQ
LYNELNLGRREEYDVLDKRRGRDPEMGGKPRRKNPQEGLYNELQKDKMAEAYSEIGMKGERRRGKGHDGLYQGLSTATKD
TYDALHMQALPPR**
CAR-T IgK C2 CD8/CD8/4-1BB/CD3z #45
N-IgKls-huMNC2scFv-CD8ecd fragment- CD8 transmembrane- 4-1BB- CD3zeta-C
(DNA)
(SEQ ID NO: 720)
atggagacagacacactcctgctatgggtactgctgctctgggttccaggttccactggtgaggtgcagctggtggagtc
tgggggaggcctggtcaagcctggggggtccctgagactctcctgtgcagcctctggattcaccttcagtggctatgcca
tgagctgggtccgccaggctccagggaaggggctggagtgggtctcaaccattagtagtggcggaacctacatatactac
cccgactcagtgaagggccgattcaccatctccagagacaacgccaagaactcactgtatctgcaaatgaacagcctgag
agccgaggacacggccgtgtattactgtgcgagacttgggggggataattactacgaatacttcgatgtctggggcaaag
ggaccacggtcaccgtctcctccggcggtggcggatccggcggtggcggatccggcggtggcggatccgacattgtgctg
acccagtctccagcctccttggccgtgtctccaggacagagggccaccatcacctgcagagccagtaagagtgtcagtac
cagcggatactcctacatgcactggtatcagcagaaaccaggacaacctcctaaactcctgatttacctggcatccaatc
tggagagcggggtcccagccaggttcagcggcagtgggtctgggaccgatttcaccctcacaattaatcctgtggaagct
aatgatactgcaaattattactgtcagcacagtagggagctgcctttcacattcggcggagggaccaaggtggagatcaa
acgaactacaacaacccctgcccccagacctcctaccccagcccctacaattgccagccagcctctgagcctgaggcccg
aggcttgtagacctgctgctggcggagccgtgcacaccagaggactggatttcgcctgcgacatctacatctgggcgccc
ttggccgggacttgtggggtccttctcctgtcactggttatcaccctttactgcaaacggggcagaaagaaactcctgta
tatattcaaacaaccatttatgagaccagtacaaactactcaagaggaagatggctgtagctgccgatttccagaagaag
aagaaggaggatgtgaactgagagtgaagttcagcaggagcgcagacgcccccgcgtacaagcagggccagaaccagctc
tataacgagctcaatctaggacgaagagaggagtacgatgttttggacaagagacgtggccgggaccctgagatgggggg
aaagccgagaaggaagaaccctcaggaaggcctgtacaatgaactgcagaaagataagatggcggaggcctacagtgaga
ttgggatgaaaggcgagcgccggaggggcaaggggcacgatggcctttaccagggtctcagtacagccaccaaggacacc
tacgacgcccttcacatgcaggccctgccccctcgctgataa
(amino acids)
(SEQ ID NO: 721)
METDTLLLWVLLLWVPGSTGEVQLVESGGGLVKPGGSLRLSCAASGFTFSGYAMSWVRQAPGKGLEWVSTISSGGTYIYY
PDSVKGRFTISRDNAKNSLYLQMNSLRAEDTAVYYCARLGGDNYYEYFDVWGKGTTVTVSSGGGGSGGGGSGGGGSDIVL
TQSPASLAVSPGQRATITCRASKSVSTSGYSYMHWYQQKPGQPPKLLIYLASNLESGVPARFSGSGSGTDFTLTINPVEA
NDTANYYCQHSRELPFTFGGGTKVEIKRTTTTPAPRPPTPAPTIASQPLSLRPEACRPAAGGAVHTRGLDFACDIYIWAP
LAGTCGVLLLSLVITLYCKRGRKKLLYIFKQPFMRPVQTTQEEDGCSCRFPEEEEGGCELRVKFSRSADAPAYKQGQNQL
YNELNLGRREEYDVLDKRRGRDPEMGGKPRRKNPQEGLYNELQKDKMAEAYSEIGMKGERRRGKGHDGLYQGLSTATKDT
YDALHMQALPPR**
CAR-T C2 op CD8/CD8/4-1BB/CD3z #46
N-CD8ls-huMNC2scFv codon optimized-CD8ecd fragment- CD8 transmembrane- 4-1BB-
CD3zeta-C
(DNA)
(SEQ ID NO: 722)
atggccttaccagtgaccgccttgctcctgccgctggccttgctgctccacgccgccaggccggaagtgcagctggtgga
atctggcggcggactcgtgaagcctggcggctctctgagactgagctgtgccgccagcggcttcacctttagcggctacg
ccatgagctgggtgcgccaggctcctggcaaaggcctggaatgggtgtccaccatctctagcggcggcacctacatctac
taccccgacagcgtgaagggccggttcaccatcagccgggacaacgccaagaacagcctgtacctgcagatgaactccct
gcgggccgaggacaccgccgtgtactattgtgctagactgggcggcgacaactactacgagtacttcgacgtgtggggca
agggcaccaccgtgacagtgtctagcggaggcggaggatcaggcggcggaggaagtggcggagggggatctgatatcgtg
ctgacccagagccctgccagcctggctgtgtctcctggacagagggccaccatcacctgtcgggccagcaagagcgtgtc
cacctccggctacagctacatgcactggtatcagcagaagcccggccagccccccaagctgctgatctacctggccagca
acctggaaagcggcgtgcccgctagattttccggctctggcagcggcaccgacttcaccctgaccatcaaccccgtggaa
gccaacgacaccgccaattactactgccagcacagcagagagctgcccttcaccttcggcggaggcaccaaggtggaaat
caagcggaccacaacaacccctgcccccagacctcctaccccagcccctacaattgccagccagcctctgagcctgaggc
ccgaggcttgtagacctgctgctggcggagccgtgcacaccagaggactggatttcgcctgcgacatctacatctgggcg
cccttggccgggacttgtggggtccttctcctgtcactggttatcaccctttactgcaaacggggcagaaagaaactcct
gtatatattcaaacaaccatttatgagaccagtacaaactactcaagaggaagatggctgtagctgccgatttccagaag
aagaagaaggaggatgtgaactgagagtgaagttcagcaggagcgcagacgcccccgcgtacaagcagggccagaaccag
ctctataacgagctcaatctaggacgaagagaggagtacgatgttttggacaagagacgtggccgggaccctgagatggg
gggaaagccgagaaggaagaaccctcaggaaggcctgtacaatgaactgcagaaagataagatggcggaggcctacagtg
agattgggatgaaaggcgagcgccggaggggcaaggggcacgatggcctttaccagggtctcagtacagccaccaaggac
acctacgacgcccttcacatgcaggccctgccccctcgctgataa
(amino acids)
(SEQ ID NO: 723)
MALPVTALLLPLALLLHAARPEVQLVESGGGLVKPGGSLRLSCAASGFTFSGYAMSWVRQAPGKGLEWVSTISSGGTYIY
YPDSVKGRFTISRDNAKNSLYLQMNSLRAEDTAVYYCARLGGDNYYEYFDVWGKGTTVTVSSGGGGSGGGGSGGGGSDIV
LTQSPASLAVSPGQRATITCRASKSVSTSGYSYMHWYQQKPGQPPKLLIYLASNLESGVPARFSGSGSGTDFTLTINPVE
ANDTANYYCQHSRELPFTFGGGTKVEIKRTTTTPAPRPPTPAPTIASQPLSLRPEACRPAAGGAVHTRGLDFACDIYIWA
PLAGTCGVLLLSLVITLYCKRGRKKLLYIFKQPFMRPVQTTQEEDGCSCRFPEEEEGGCELRVKFSRSADAPAYKQGQNQ
LYNELNLGRREEYDVLDKRRGRDPEMGGKPRRKNPQEGLYNELQKDKMAEAYSEIGMKGERRRGKGHDGLYQGLSTATKD
TYDALHMQALPPR**
CAR-T IgK C2 op CD8/CD8/4-1BB/CD3z #47
N-IgKls-huMNC2scFv codon optimized-CD8ecd fragment- CD8 transmembrane- 4-1BB-
CD3zeta-C
(DNA)
(SEQ ID NO: 724)
atggagacagacacactcctgctatgggtactgctgctctgggttccaggttccactggtgaagtgcagctggtggaatc
tggcggcggactcgtgaagcctggcggctctctgagactgagctgtgccgccagcggcttcacctttagcggctacgcca
tgagctgggtgcgccaggctcctggcaaaggcctggaatgggtgtccaccatctctagcggcggcacctacatctactac
cccgacagcgtgaagggccggttcaccatcagccgggacaacgccaagaacagcctgtacctgcagatgaactccctgcg
ggccgaggacaccgccgtgtactattgtgctagactgggcggcgacaactactacgagtacttcgacgtgtggggcaagg
gcaccaccgtgacagtgtctagcggaggcggaggatcaggcggcggaggaagtggcggagggggatctgatatcgtgctg
acccagagccctgccagcctggctgtgtctcctggacagagggccaccatcacctgtcgggccagcaagagcgtgtccac
ctccggctacagctacatgcactggtatcagcagaagcccggccagccccccaagctgctgatctacctggccagcaacc
tggaaagcggcgtgcccgctagattttccggctctggcagcggcaccgacttcaccctgaccatcaaccccgtggaagcc
aacgacaccgccaattactactgccagcacagcagagagctgcccttcaccttcggcggaggcaccaaggtggaaatcaa
gcggaccacaacaacccctgcccccagacctcctaccccagcccctacaattgccagccagcctctgagcctgaggcccg
aggcttgtagacctgctgctggcggagccgtgcacaccagaggactggatttcgcctgcgacatctacatctgggcgccc
ttggccgggacttgtggggtccttctcctgtcactggttatcaccctttactgcaaacggggcagaaagaaactcctgta
tatattcaaacaaccatttatgagaccagtacaaactactcaagaggaagatggctgtagctgccgatttccagaagaag
aagaaggaggatgtgaactgagagtgaagttcagcaggagcgcagacgcccccgcgtacaagcagggccagaaccagctc
tataacgagctcaatctaggacgaagagaggagtacgatgttttggacaagagacgtggccgggaccctgagatgggggg
aaagccgagaaggaagaaccctcaggaaggcctgtacaatgaactgcagaaagataagatggcggaggcctacagtgaga
ttgggatgaaaggcgagcgccggaggggcaaggggcacgatggcctttaccagggtctcagtacagccaccaaggacacc
tacgacgcccttcacatgcaggccctgccccctcgctgataa
(amino acids)
(SEQ ID NO: 725)
METDTLLLWVLLLWVPGSTGEVQLVESGGGLVKPGGSLRLSCAASGFTFSGYAMSWVRQAPGKGLEWVSTISSGGTYIYY
PDSVKGRFTISRDNAKNSLYLQMNSLRAEDTAVYYCARLGGDNYYEYFDVWGKGTTVTVSSGGGGSGGGGSGGGGSDIVL
TQSPASLAVSPGQRATITCRASKSVSTSGYSYMHWYQQKPGQPPKLLIYLASNLESGVPARFSGSGSGTDFTLTINPVEA
NDTANYYCQHSRELPFTFGGGTKVEIKRTTTTPAPRPPTPAPTIASQPLSLRPEACRPAAGGAVHTRGLDFACDIYIWAP
LAGTCGVLLLSLVITLYCKRGRKKLLYIFKQPFMRPVQTTQEEDGCSCRFPEEEEGGCELRVKFSRSADAPAYKQGQNQL
YNELNLGRREEYDVLDKRRGRDPEMGGKPRRKNPQEGLYNELQKDKMAEAYSEIGMKGERRRGKGHDGLYQGLSTATKDT
YDALHMQALPPR**
CAR-T C2 CD8/CD8/4-1BB/CD3z op #48
N-CD8ls-huMNC2scFv -CD8ecd fragment- CD8 transmembrane- 4-1BB- CD3zeta (all
domains codon optimized)-C
(DNA)
(SEQ ID NO: 726)
atggccttaccagtgaccgccttgctcctgccgctggccttgctgctccacgccgccaggccggaagtgcagctggtgga
atctggcggcggactcgtgaagcctggcggctctctgagactgagctgtgccgccagcggcttcacctttagcggctacg
ccatgagctgggtgcgccaggctcctggcaaaggcctggaatgggtgtccaccatctctagcggcggcacctacatctac
taccccgacagcgtgaagggccggttcaccatcagccgggacaacgccaagaacagcctgtacctgcagatgaactccct
gcgggccgaggacaccgccgtgtactattgtgctagactgggcggcgacaactactacgagtacttcgacgtgtggggca
agggcaccaccgtgacagtgtctagcggaggcggaggatcaggcggcggaggaagtggcggagggggatctgatatcgtg
ctgacccagagccctgccagcctggctgtgtctcctggacagagggccaccatcacctgtcgggccagcaagagcgtgtc
cacctccggctacagctacatgcactggtatcagcagaagcccggccagccccccaagctgctgatctacctggccagca
acctggaaagcggcgtgcccgctagattttccggctctggcagcggcaccgacttcaccctgaccatcaaccccgtggaa
gccaacgacaccgccaattactactgccagcacagcagagagctgcccttcaccttcggcggaggcaccaaggtggaaat
caagcggaccacaacaacccctgcccccagacctcctaccccagcccctacaattgccagccagcctctgagcctgaggc
ccgaggcttgtagacctgctgctggcggagccgtgcacaccagaggactggatttcgcctgcgacatctacatctgggcc
cctctggccggcacatgtggcgtgctgctgctgagcctcgtgatcaccctgtactgcaagcggggcagaaagaagctgct
gtacatcttcaagcagcccttcatgcggcccgtgcagaccacccaggaagaggacggctgctcctgcagattccccgagg
aagaagaaggcggctgcgagctgagagtgaagttcagcagatccgccgacgcccctgcctacaagcagggccagaaccag
ctgtacaacgagctgaacctgggcagacgggaagagtacgacgtgctggacaagcggagaggcagggaccctgagatggg
cggcaagcccagaagaaagaacccccaggaaggcctgtataacgaactgcagaaagacaagatggccgaggcctacagcg
agatcggaatgaagggcgagcggagaagaggcaagggccacgatggcctgtaccagggcctgagcaccgccaccaaggac
acctatgacgccctgcacatgcaggccctgcctcccagatgataa
(amino acids)
(SEQ ID NO: 727)
MALPVTALLLPLALLLHAARPEVQLVESGGGLVKPGGSLRLSCAASGFTFSGYAMSWVRQAPGKGLEWVSTISSGGTYIY
YPDSVKGRFTISRDNAKNSLYLQMNSLRAEDTAVYYCARLGGDNYYEYFDVWGKGTTVTVSSGGGGSGGGGSGGGGSDIV
LTQSPASLAVSPGQRATITCRASKSVSTSGYSYMHWYQQKPGQPPKLLIYLASNLESGVPARFSGSGSGTDFTLTINPVE
ANDTANYYCQHSRELPFTFGGGTKVEIKRTTTTPAPRPPTPAPTIASQPLSLRPEACRPAAGGAVHTRGLDFACDIYIWA
PLAGTCGVLLLSLVITLYCKRGRKKLLYIFKQPFMRPVQTTQEEDGCSCRFPEEEEGGCELRVKFSRSADAPAYKQGQNQ
LYNELNLGRREEYDVLDKRRGRDPEMGGKPRRKNPQEGLYNELQKDKMAEAYSEIGMKGERRRGKGHDGLYQGLSTATKD
TYDALHMQALPPR**
CAR-T IgK C2 CD8/CD8/4-1BB/CD3z op #49
N-IgKls-huMNC2scFv -CD8ecd fragment- CD8 transmembrane- 4-1BB- CD3zeta (all
domains codon optimized)-C
(DNA)
(SEQ ID NO: 728)
atggagacagacacactcctgctatgggtactgctgctctgggttccaggttccactggtgaagtgcagctggtggaatc
tggcggcggactcgtgaagcctggcggctctctgagactgagctgtgccgccagcggcttcacctttagcggctacgcca
tgagctgggtgcgccaggctcctggcaaaggcctggaatgggtgtccaccatctctagcggcggcacctacatctactac
cccgacagcgtgaagggccggttcaccatcagccgggacaacgccaagaacagcctgtacctgcagatgaactccctgcg
ggccgaggacaccgccgtgtactattgtgctagactgggcggcgacaactactacgagtacttcgacgtgtggggcaagg
gcaccaccgtgacagtgtctagcggaggcggaggatcaggcggcggaggaagtggcggagggggatctgatatcgtgctg
acccagagccctgccagcctggctgtgtctcctggacagagggccaccatcacctgtcgggccagcaagagcgtgtccac
ctccggctacagctacatgcactggtatcagcagaagcccggccagccccccaagctgctgatctacctggccagcaacc
tggaaagcggcgtgcccgctagattttccggctctggcagcggcaccgacttcaccctgaccatcaaccccgtggaagcc
aacgacaccgccaattactactgccagcacagcagagagctgcccttcaccttcggcggaggcaccaaggtggaaatcaa
gcggaccacaacaacccctgcccccagacctcctaccccagcccctacaattgccagccagcctctgagcctgaggcccg
aggcttgtagacctgctgctggcggagccgtgcacaccagaggactggatttcgcctgcgacatctacatctgggcccct
ctggccggcacatgtggcgtgctgctgctgagcctcgtgatcaccctgtactgcaagcggggcagaaagaagctgctgta
catcttcaagcagcccttcatgcggcccgtgcagaccacccaggaagaggacggctgctcctgcagattccccgaggaag
aagaaggcggctgcgagctgagagtgaagttcagcagatccgccgacgcccctgcctacaagcagggccagaaccagctg
tacaacgagctgaacctgggcagacgggaagagtacgacgtgctggacaagcggagaggcagggaccctgagatgggcgg
caagcccagaagaaagaacccccaggaaggcctgtataacgaactgcagaaagacaagatggccgaggcctacagcgaga
tcggaatgaagggcgagcggagaagaggcaagggccacgatggcctgtaccagggcctgagcaccgccaccaaggacacc
tatgacgccctgcacatgcaggccctgcctcccagatgataa
(amino acids)
(SEQ ID NO: 729)
METDTLLLWVLLLWVPGSTGEVQLVESGGGLVKPGGSLRLSCAASGFTFSGYAMSWVRQAPGKGLEWVSTISSGGTYIYY
PDSVKGRFTISRDNAKNSLYLQMNSLRAEDTAVYYCARLGGDNYYEYFDVWGKGTTVTVSSGGGGSGGGGSGGGGSDIVL
TQSPASLAVSPGQRATITCRASKSVSTSGYSYMHWYQQKPGQPPKLLIYLASNLESGVPARFSGSGSGTDFTLTINPVEA
NDTANYYCQHSRELPFTFGGGTKVEIKRTTTTPAPRPPTPAPTIASQPLSLRPEACRPAAGGAVHTRGLDFACDIYIWAP
LAGTCGVLLLSLVITLYCKRGRKKLLYIFKQPFMRPVQTTQEEDGCSCRFPEEEEGGCELRVKFSRSADAPAYKQGQNQL
YNELNLGRREEYDVLDKRRGRDPEMGGKPRRKNPQEGLYNELQKDKMAEAYSEIGMKGERRRGKGHDGLYQGLSTATKDT
YDALHMQALPPR**
CAR-T C2 CD4/CD4/4-1BB/CD3z #50
N-CD8ls-huMNC2scFv-CD4ecd fragment- CD4 transmembrane- 4-1BB- CD3zeta-C
(DNA)
(SEQ ID NO: 730)
atggccttaccagtgaccgccttgctcctgccgctggccttgctgctccacgccgccaggccggaggtgcagctggtgga
gtctgggggaggcctggtcaagcctggggggtccctgagactctcctgtgcagcctctggattcaccttcagtggctatg
ccatgagctgggtccgccaggctccagggaaggggctggagtgggtctcaaccattagtagtggcggaacctacatatac
taccccgactcagtgaagggccgattcaccatctccagagacaacgccaagaactcactgtatctgcaaatgaacagcct
gagagccgaggacacggccgtgtattactgtgcgagacttgggggggataattactacgaatacttcgatgtctggggca
aagggaccacggtcaccgtctcctccggcggtggcggatccggcggtggcggatccggcggtggcggatccgacattgtg
ctgacccagtctccagcctccttggccgtgtctccaggacagagggccaccatcacctgcagagccagtaagagtgtcag
taccagcggatactcctacatgcactggtatcagcagaaaccaggacaacctcctaaactcctgatttacctggcatcca
atctggagagcggggtcccagccaggttcagcggcagtgggtctgggaccgatttcaccctcacaattaatcctgtggaa
gctaatgatactgcaaattattactgtcagcacagtagggagctgcctttcacattcggcggagggaccaaggtggagat
caaacgaacttcgggacaggtcctgctggaatccaacatcaaggttctgcccacatggtccaccccggtgcagccaatgg
ccctgattgtgctggggggcgtcgccggcctcctgcttttcattgggctaggcatcttcttcaaacggggcagaaagaaa
ctcctgtatatattcaaacaaccatttatgagaccagtacaaactactcaagaggaagatggctgtagctgccgatttcc
agaagaagaagaaggaggatgtgaactgagagtgaagttcagcaggagcgcagacgcccccgcgtacaagcagggccaga
accagctctataacgagctcaatctaggacgaagagaggagtacgatgttttggacaagagacgtggccgggaccctgag
atggggggaaagccgagaaggaagaaccctcaggaaggcctgtacaatgaactgcagaaagataagatggcggaggccta
cagtgagattgggatgaaaggcgagcgccggaggggcaaggggcacgatggcctttaccagggtctcagtacagccacca
aggacacctacgacgcccttcacatgcaggccctgccccctcgctgataa
(amino acids)
(SEQ ID NO: 731)
MALPVTALLLPLALLLHAARPEVQLVESGGGLVKPGGSLRLSCAASGFTFSGYAMSWVRQAPGKGLEWVSTISSGGTYIY
YPDSVKGRFTISRDNAKNSLYLQMNSLRAEDTAVYYCARLGGDNYYEYFDVWGKGTTVTVSSGGGGSGGGGSGGGGSDIV
LTQSPASLAVSPGQRATITCRASKSVSTSGYSYMHWYQQKPGQPPKLLIYLASNLESGVPARFSGSGSGTDFTLTINPVE
ANDTANYYCQHSRELPFTFGGGTKVEIKRTSGQVLLESNIKVLPTWSTPVQPMALIVLGGVAGLLLFIGLGIFFKRGRKK
LLYIFKQPFMRPVQTTQEEDGCSCRFPEEEEGGCELRVKFSRSADAPAYKQGQNQLYNELNLGRREEYDVLDKRRGRDPE
MGGKPRRKNPQEGLYNELQKDKMAEAYSEIGMKGERRRGKGHDGLYQGLSTATKDTYDALHMQALPPR**
CAR-T C2 FC/CD8/4-1BB/CD3z “Fc” CAR53
N-CD8ls-huMNC2scFv-Human IgG1 Fc- CD8 transmembrane- 4-1BB- CD3zeta-C
(DNA)
(SEQ ID NO: 732)
atggccttaccagtgaccgccttgctcctgccgctggccttgctgctccacgccgccaggccggaggtgcagctggtgga
gtctgggggaggcctggtcaagcctggggggtccctgagactctcctgtgcagcctctggattcaccttcagtggctatg
ccatgagctgggtccgccaggctccagggaaggggctggagtgggtctcaaccattagtagtggcggaacctacatatac
taccccgactcagtgaagggccgattcaccatctccagagacaacgccaagaactcactgtatctgcaaatgaacagcct
gagagccgaggacacggccgtgtattactgtgcgagacttgggggggataattactacgaatacttcgatgtctggggca
aagggaccacggtcaccgtctcctccggcggtggcggatccggcggtggcggatccggcggtggcggatccgacattgtg
ctgacccagtctccagcctccttggccgtgtctccaggacagagggccaccatcacctgcagagccagtaagagtgtcag
taccagcggatactcctacatgcactggtatcagcagaaaccaggacaacctcctaaactcctgatttacctggcatcca
atctggagagcggggtcccagccaggttcagcggcagtgggtctgggaccgatttcaccctcacaattaatcctgtggaa
gctaatgatactgcaaattattactgtcagcacagtagggagctgcctttcacattcggcggagggaccaaggtggagat
caaacgaactgagcccaaatcttgtgacaaaactcacacatgcccaccgtgcccagcacctgaactcctggggggaccgt
cagtcttcctcttccccccaaaacccaaggacaccctcatgatctcccggacccctgaggtcacatgcgtggtggtggac
gtgagccacgaagaccctgaggtcaagttcaactggtacgtggacggcgtggaggtgcataatgccaagacaaagccgcg
ggaggagcagtacaacagcacgtaccgtgtggtcagcgtcctcaccgtcctgcaccaggactggctgaatggcaaggagt
acaagtgcaaggtctccaacaaagccctcccagcccccatcgagaaaaccatctccaaagccaaagggcagccccgagaa
ccacaggtgtacaccctgcccccatcccgggaggagatgaccaagaaccaggtcagcctgacctgcctggtcaaaggctt
ctatcccagcgacatcgccgtggagtgggagagcaatgggcagccggagaacaactacaagaccacgcctcccgtgctgg
actccgacggctccttcttcctctacagcaagctcaccgtggacaagagcaggtggcagcaggggaacgtcttctcatgc
tccgtgatgcatgaggctctgcacaaccactacacgcagaagagcctctccctgtctccgggtaaaatctacatctgggc
gcccttggccgggacttgtggggtccttctcctgtcactggttatcaccctttactgcaaacggggcagaaagaaactcc
tgtatatattcaaacaaccatttatgagaccagtacaaactactcaagaggaagatggctgtagctgccgatttccagaa
gaagaagaaggaggatgtgaactgagagtgaagttcagcaggagcgcagacgcccccgcgtacaagcagggccagaacca
gctctataacgagctcaatctaggacgaagagaggagtacgatgttttggacaagagacgtggccgggaccctgagatgg
ggggaaagccgagaaggaagaaccctcaggaaggcctgtacaatgaactgcagaaagataagatggcggaggcctacagt
gagattgggatgaaaggcgagcgccggaggggcaaggggcacgatggcctttaccagggtctcagtacagccaccaagga
cacctacgacgcccttcacatgcaggccctgccccctcgctgataa
(amino acids)
(SEQ ID NO: 733)
MALPVTALLLPLALLLHAARPEVQLVESGGGLVKPGGSLRLSCAASGFTFSGYAMSWVRQAPGKGLEWVSTISSGGTYIY
YPDSVKGRFTISRDNAKNSLYLQMNSLRAEDTAVYYCARLGGDNYYEYFDVWGKGTTVTVSSGGGGSGGGGSGGGGSDIV
LTQSPASLAVSPGQRATITCRASKSVSTSGYSYMHWYQQKPGQPPKLLIYLASNLESGVPARFSGSGSGTDFTLTINPVE
ANDTANYYCQHSRELPFTFGGGTKVEIKRTEPKSCDKTHTCPPCPAPELLGGPSVFLFPPKPKDTLMISRTPEVTCVVVD
VSHEDPEVKFNWYVDGVEVHNAKTKPREEQYNSTYRVVSVLTVLHQDWLNGKEYKCKVSNKALPAPIEKTISKAKGQPRE
PQVYTLPPSREEMTKNQVSLTCLVKGFYPSDIAVEWESNGQPENNYKTTPPVLDSDGSFFLYSKLTVDKSRWQQGNVFSC
SVMHEALHNHYTQKSLSLSPGKIYIWAPLAGTCGVLLLSLVITLYCKRGRKKLLYIFKQPFMRPVQTTQEEDGCSCRFPE
EEEGGCELRVKFSRSADAPAYKQGQNQLYNELNLGRREEYDVLDKRRGRDPEMGGKPRRKNPQEGLYNELQKDKMAEAYS
EIGMKGERRRGKGHDGLYQGLSTATKDTYDALHMQALPPR**
CAR-T C2 IgD/FC/CD8/4-1BB/CD3z “IgD-Fc” CAR54
N-CD8ls-huMNC2scFv- IgD hinge- Human IgG1 Fc- CD8 transmembrane- 4-1BB-
CD3zeta-C
(DNA)
(SEQ ID NO: 734)
atggccttaccagtgaccgccttgctcctgccgctggccttgctgctccacgccgccaggccggaggtgcagctggtgga
gtctgggggaggcctggtcaagcctggggggtccctgagactctcctgtgcagcctctggattcaccttcagtggctatg
ccatgagctgggtccgccaggctccagggaaggggctggagtgggtctcaaccattagtagtggcggaacctacatatac
taccccgactcagtgaagggccgattcaccatctccagagacaacgccaagaactcactgtatctgcaaatgaacagcct
gagagccgaggacacggccgtgtattactgtgcgagacttgggggggataattactacgaatacttcgatgtctggggca
aagggaccacggtcaccgtctcctccggcggtggcggatccggcggtggcggatccggcggtggcggatccgacattgtg
ctgacccagtctccagcctccttggccgtgtctccaggacagagggccaccatcacctgcagagccagtaagagtgtcag
taccagcggatactcctacatgcactggtatcagcagaaaccaggacaacctcctaaactcctgatttacctggcatcca
atctggagagcggggtcccagccaggttcagcggcagtgggtctgggaccgatttcaccctcacaattaatcctgtggaa
gctaatgatactgcaaattattactgtcagcacagtagggagctgcctttcacattcggcggagggaccaaggtggagat
caaacgaactgagtctccaaaggcacaggcctcctcagtgcccactgcacaaccccaagcagagggcagcctcgccaagg
caaccacagccccagccaccacccgtaacacaggaagaggcggcgaagagaagaaaaaggagaaggagaaagaggaacaa
gaagagagagagacaaagacaccagagcccaaatcttgtgacaaaactcacacatgcccaccgtgcccagcacctgaact
cctggggggaccgtcagtcttcctcttccccccaaaacccaaggacaccctcatgatctcccggacccctgaggtcacat
gcgtggtggtggacgtgagccacgaagaccctgaggtcaagttcaactggtacgtggacggcgtggaggtgcataatgcc
aagacaaagccgcgggaggagcagtacaacagcacgtaccgtgtggtcagcgtcctcaccgtcctgcaccaggactggct
gaatggcaaggagtacaagtgcaaggtctccaacaaagccctcccagcccccatcgagaaaaccatctccaaagccaaag
ggcagccccgagaaccacaggtgtacaccctgcccccatcccgggaggagatgaccaagaaccaggtcagcctgacctgc
ctggtcaaaggcttctatcccagcgacatcgccgtggagtgggagagcaatgggcagccggagaacaactacaagaccac
gcctcccgtgctggactccgacggctccttcttcctctacagcaagctcaccgtggacaagagcaggtggcagcagggga
acgtcttctcatgctccgtgatgcatgaggctctgcacaaccactacacgcagaagagcctctccctgtctccgggtaaa
atctacatctgggcgcccttggccgggacttgtggggtccttctcctgtcactggttatcaccctttactgcaaacgggg
cagaaagaaactcctgtatatattcaaacaaccatttatgagaccagtacaaactactcaagaggaagatggctgtagct
gccgatttccagaagaagaagaaggaggatgtgaactgagagtgaagttcagcaggagcgcagacgcccccgcgtacaag
cagggccagaaccagctctataacgagctcaatctaggacgaagagaggagtacgatgttttggacaagagacgtggccg
ggaccctgagatggggggaaagccgagaaggaagaaccctcaggaaggcctgtacaatgaactgcagaaagataagatgg
cggaggcctacagtgagattgggatgaaaggcgagcgccggaggggcaaggggcacgatggcctttaccagggtctcagt
acagccaccaaggacacctacgacgcccttcacatgcaggccctgccccctcgctgataa
(amino acids)
(SEQ ID NO: 735)
MALPVTALLLPLALLLHAARPEVQLVESGGGLVKPGGSLRLSCAASGFTFSGYAMSWVRQAPGKGLEWVSTISSGGTYIY
YPDSVKGRFTISRDNAKNSLYLQMNSLRAEDTAVYYCARLGGDNYYEYFDVWGKGTTVTVSSGGGGSGGGGSGGGGSDIV
LTQSPASLAVSPGQRATITCRASKSVSTSGYSYMHWYQQKPGQPPKLLIYLASNLESGVPARFSGSGSGTDFTLTINPVE
ANDTANYYCQHSRELPFTFGGGTKVEIKRTESPKAQASSVPTAQPQAEGSLAKATTAPATTRNTGRGGEEKKKEKEKEEQ
EERETKTPEPKSCDKTHTCPPCPAPELLGGPSVFLFPPKPKDTLMISRTPEVTCVVVDVSHEDPEVKFNWYVDGVEVHNA
KTKPREEQYNSTYRVVSVLTVLHQDWLNGKEYKCKVSNKALPAPIEKTISKAKGQPREPQVYTLPPSREEMTKNQVSLTC
LVKGFYPSDIAVEWESNGQPENNYKTTPPVLDSDGSFFLYSKLTVDKSRWQQGNVFSCSVMHEALHNHYTQKSLSLSPGK
IYIWAPLAGTCGVLLLSLVITLYCKRGRKKLLYIFKQPFMRPVQTTQEEDGCSCRFPEEEEGGCELRVKFSRSADAPAYK
QGQNQLYNELNLGRREEYDVLDKRRGRDPEMGGKPRRKNPQEGLYNELQKDKMAEAYSEIGMKGERRRGKGHDGLYQGLS
TATKDTYDALHMQALPPR**
CAR-T C2 FCHingeless Y407R/CD8/4-1BB/CD3z “FcH” CAR55
N-CD8ls-huMNC2scFv-Human IgG1 hingeless Fc Y407R- CD8 transmembrane- 4-1BB-
CD3zeta-C
(DNA)
(SEQ ID NO: 736)
atggccttaccagtgaccgccttgctcctgccgctggccttgctgctccacgccgccaggccggaggtgcagctggtgga
gtctgggggaggcctggtcaagcctggggggtccctgagactctcctgtgcagcctctggattcaccttcagtggctatg
ccatgagctgggtccgccaggctccagggaaggggctggagtgggtctcaaccattagtagtggcggaacctacatatac
taccccgactcagtgaagggccgattcaccatctccagagacaacgccaagaactcactgtatctgcaaatgaacagcct
gagagccgaggacacggccgtgtattactgtgcgagacttgggggggataattactacgaatacttcgatgtctggggca
aagggaccacggtcaccgtctcctccggcggtggcggatccggcggtggcggatccggcggtggcggatccgacattgtg
ctgacccagtctccagcctccttggccgtgtctccaggacagagggccaccatcacctgcagagccagtaagagtgtcag
taccagcggatactcctacatgcactggtatcagcagaaaccaggacaacctcctaaactcctgatttacctggcatcca
atctggagagcggggtcccagccaggttcagcggcagtgggtctgggaccgatttcaccctcacaattaatcctgtggaa
gctaatgatactgcaaattattactgtcagcacagtagggagctgcctttcacattcggcggagggaccaaggtggagat
caaacgaactgcacctgaactcctggggggaccgtcagtcttcctcttccccccaaaacccaaggacaccctcatgatct
cccggacccctgaggtcacatgcgtggtggtggacgtgagccacgaagaccctgaggtcaagttcaactggtacgtggac
ggcgtggaggtgcataatgccaagacaaagccgcgggaggagcagtacaacagcacgtaccgtgtggtcagcgtcctcac
cgtcctgcaccaggactggctgaatggcaaggagtacaagtgcaaggtctccaacaaagccctcccagcccccatcgaga
aaaccatctccaaagccaaagggcagccccgagaaccacaggtgtacaccctgcccccatcccgggaggagatgaccaag
aaccaggtcagcctgacctgcctggtcaaaggcttctatcccagcgacatcgccgtggagtgggagagcaatgggcagcc
ggagaacaactacaagaccacgcctcccgtgctggactccgacggctccttcttcctcaggagcaagctcaccgtggaca
agagcaggtggcagcaggggaacgtcttctcatgctccgtgatgcatgaggctctgcacaaccactacacgcagaagagc
ctctccctgtctccgggtaaaatctacatctgggcgcccttggccgggacttgtggggtccttctcctgtcactggttat
caccctttactgcaaacggggcagaaagaaactcctgtatatattcaaacaaccatttatgagaccagtacaaactactc
aagaggaagatggctgtagctgccgatttccagaagaagaagaaggaggatgtgaactgagagtgaagttcagcaggagc
gcagacgcccccgcgtacaagcagggccagaaccagctctataacgagctcaatctaggacgaagagaggagtacgatgt
tttggacaagagacgtggccgggaccctgagatggggggaaagccgagaaggaagaaccctcaggaaggcctgtacaatg
aactgcagaaagataagatggcggaggcctacagtgagattgggatgaaaggcgagcgccggaggggcaaggggcacgat
ggcctttaccagggtctcagtacagccaccaaggacacctacgacgcccttcacatgcaggccctgccccctcgctgata
a
(amino acids)
(SEQ ID NO: 737)
MALPVTALLLPLALLLHAARPEVQLVESGGGLVKPGGSLRLSCAASGFTFSGYAMSWVRQAPGKGLEWVSTISSGGTYIY
YPDSVKGRFTISRDNAKNSLYLQMNSLRAEDTAVYYCARLGGDNYYEYFDVWGKGTTVTVSSGGGGSGGGGSGGGGSDIV
LTQSPASLAVSPGQRATITCRASKSVSTSGYSYMHWYQQKPGQPPKLLIYLASNLESGVPARFSGSGSGTDFTLTINPVE
ANDTANYYCQHSRELPFTFGGGTKVEIKRTAPELLGGPSVFLFPPKPKDTLMISRTPEVTCVVVDVSHEDPEVKFNWYVD
GVEVHNAKTKPREEQYNSTYRVVSVLTVLHQDWLNGKEYKCKVSNKALPAPIEKTISKAKGQPREPQVYTLPPSREEMTK
NQVSLTCLVKGFYPSDIAVEWESNGQPENNYKTTPPVLDSDGSFFLRSKLTVDKSRWQQGNVFSCSVMHEALHNHYTQKS
LSLSPGKIYIWAPLAGTCGVLLLSLVITLYCKRGRKKLLYIFKQPFMRPVQTTQEEDGCSCRFPEEEEGGCELRVKFSRS
ADAPAYKQGQNQLYNELNLGRREEYDVLDKRRGRDPEMGGKPRRKNPQEGLYNELQKDKMAEAYSEIGMKGERRRGKGHD
GLYQGLSTATKDTYDALHMQALPPR**
CAR-T C2 IgD/FCHingeless Y407R/CD8/4-1BB/CD3z “IgD FcH” CAR56
N-CD8ls- huMNC2scFv- IgD hinge- Human IgG1 hingeless Fc Y407R- CD8
transmembrane- 4-1BB- CD3zeta-C
(DNA)
(SEQ ID NO: 738)
atggccttaccagtgaccgccttgctcctgccgctggccttgctgctccacgccgccaggccggaggtgcagctggtgga
gtctgggggaggcctggtcaagcctggggggtccctgagactctcctgtgcagcctctggattcaccttcagtggctatg
ccatgagctgggtccgccaggctccagggaaggggctggagtgggtctcaaccattagtagtggcggaacctacatatac
taccccgactcagtgaagggccgattcaccatctccagagacaacgccaagaactcactgtatctgcaaatgaacagcct
gagagccgaggacacggccgtgtattactgtgcgagacttgggggggataattactacgaatacttcgatgtctggggca
aagggaccacggtcaccgtctcctccggcggtggcggatccggcggtggcggatccggcggtggcggatccgacattgtg
ctgacccagtctccagcctccttggccgtgtctccaggacagagggccaccatcacctgcagagccagtaagagtgtcag
taccagcggatactcctacatgcactggtatcagcagaaaccaggacaacctcctaaactcctgatttacctggcatcca
atctggagagcggggtcccagccaggttcagcggcagtgggtctgggaccgatttcaccctcacaattaatcctgtggaa
gctaatgatactgcaaattattactgtcagcacagtagggagctgcctttcacattcggcggagggaccaaggtggagat
caaacgaactgagtctccaaaggcacaggcctcctcagtgcccactgcacaaccccaagcagagggcagcctcgccaagg
caaccacagccccagccaccacccgtaacacaggaagaggcggcgaagagaagaaaaaggagaaggagaaagaggaacaa
gaagagagagagacaaagacaccagcacctgaactcctggggggaccgtcagtcttcctcttccccccaaaacccaagga
caccctcatgatctcccggacccctgaggtcacatgcgtggtggtggacgtgagccacgaagaccctgaggtcaagttca
actggtacgtggacggcgtggaggtgcataatgccaagacaaagccgcgggaggagcagtacaacagcacgtaccgtgtg
gtcagcgtcctcaccgtcctgcaccaggactggctgaatggcaaggagtacaagtgcaaggtctccaacaaagccctccc
agcccccatcgagaaaaccatctccaaagccaaagggcagccccgagaaccacaggtgtacaccctgcccccatcccggg
aggagatgaccaagaaccaggtcagcctgacctgcctggtcaaaggcttctatcccagcgacatcgccgtggagtgggag
agcaatgggcagccggagaacaactacaagaccacgcctcccgtgctggactccgacggctccttcttcctcaggagcaa
gctcaccgtggacaagagcaggtggcagcaggggaacgtcttctcatgctccgtgatgcatgaggctctgcacaaccact
acacgcagaagagcctctccctgtctccgggtaaaatctacatctgggcgcccttggccgggacttgtggggtccttctc
ctgtcactggttatcaccctttactgcaaacggggcagaaagaaactcctgtatatattcaaacaaccatttatgagacc
agtacaaactactcaagaggaagatggctgtagctgccgatttccagaagaagaagaaggaggatgtgaactgagagtga
agttcagcaggagcgcagacgcccccgcgtacaagcagggccagaaccagctctataacgagctcaatctaggacgaaga
gaggagtacgatgttttggacaagagacgtggccgggaccctgagatggggggaaagccgagaaggaagaaccctcagga
aggcctgtacaatgaactgcagaaagataagatggcggaggcctacagtgagattgggatgaaaggcgagcgccggaggg
gcaaggggcacgatggcctttaccagggtctcagtacagccaccaaggacacctacgacgcccttcacatgcaggccctg
ccccctcgctgataa
(amino acids)
(SEQ ID NO: 739)
MALPVTALLLPLALLLHAARPEVQLVESGGGLVKPGGSLRLSCAASGFTFSGYAMSWVRQAPGKGLEWVSTISSGGTYIY
YPDSVKGRFTISRDNAKNSLYLQMNSLRAEDTAVYYCARLGGDNYYEYFDVWGKGTTVTVSSGGGGSGGGGSGGGGSDIV
LTQSPASLAVSPGQRATITCRASKSVSTSGYSYMHWYQQKPGQPPKLLIYLASNLESGVPARFSGSGSGTDFTLTINPVE
ANDTANYYCQHSRELPFTFGGGTKVEIKRTESPKAQASSVPTAQPQAEGSLAKATTAPATTRNTGRGGEEKKKEKEKEEQ
EERETKTPAPELLGGPSVFLFPPKPKDTLMISRTPEVTCVVVDVSHEDPEVKFNWYVDGVEVHNAKTKPREEQYNSTYRV
VSVLTVLHQDWLNGKEYKCKVSNKALPAPIEKTISKAKGQPREPQVYTLPPSREEMTKNQVSLTCLVKGFYPSDIAVEWE
SNGQPENNYKTTPPVLDSDGSFFLRSKLTVDKSRWQQGNVFSCSVMHEALHNHYTQKSLSLSPGKIYIWAPLAGTCGVLL
LSLVITLYCKRGRKKLLYIFKQPFMRPVQTTQEEDGCSCRFPEEEEGGCELRVKFSRSADAPAYKQGQNQLYNELNLGRR
EEYDVLDKRRGRDPEMGGKPRRKNPQEGLYNELQKDKMAEAYSEIGMKGERRRGKGHDGLYQGLSTATKDTYDALHMQAL
PPR**
CAR-T C2 IgD/CD8/4-1BB/CD3z “IgD” CAR57
N-CD8ls-huMNC2scFv- IgD hinge- CD8 transmembrane- 4-1BB- CD3zeta-C
(DNA)
(SEQ ID NO: 740)
atggccttaccagtgaccgccttgctcctgccgctggccttgctgctccacgccgccaggccggaggtgcagctggtgga
gtctgggggaggcctggtcaagcctggggggtccctgagactctcctgtgcagcctctggattcaccttcagtggctatg
ccatgagctgggtccgccaggctccagggaaggggctggagtgggtctcaaccattagtagtggcggaacctacatatac
taccccgactcagtgaagggccgattcaccatctccagagacaacgccaagaactcactgtatctgcaaatgaacagcct
gagagccgaggacacggccgtgtattactgtgcgagacttgggggggataattactacgaatacttcgatgtctggggca
aagggaccacggtcaccgtctcctccggcggtggcggatccggcggtggcggatccggcggtggcggatccgacattgtg
ctgacccagtctccagcctccttggccgtgtctccaggacagagggccaccatcacctgcagagccagtaagagtgtcag
taccagcggatactcctacatgcactggtatcagcagaaaccaggacaacctcctaaactcctgatttacctggcatcca
atctggagagcggggtcccagccaggttcagcggcagtgggtctgggaccgatttcaccctcacaattaatcctgtggaa
gctaatgatactgcaaattattactgtcagcacagtagggagctgcctttcacattcggcggagggaccaaggtggagat
caaacgaactgagtctccaaaggcacaggcctcctcagtgcccactgcacaaccccaagcagagggcagcctcgccaagg
caaccacagccccagccaccacccgtaacacaggaagaggcggcgaagagaagaaaaaggagaaggagaaagaggaacaa
gaagagagagagacaaagacaccaatctacatctgggcgcccttggccgggacttgtggggtccttctcctgtcactggt
tatcaccctttactgcaaacggggcagaaagaaactcctgtatatattcaaacaaccatttatgagaccagtacaaacta
ctcaagaggaagatggctgtagctgccgatttccagaagaagaagaaggaggatgtgaactgagagtgaagttcagcagg
agcgcagacgcccccgcgtacaagcagggccagaaccagctctataacgagctcaatctaggacgaagagaggagtacga
tgttttggacaagagacgtggccgggaccctgagatggggggaaagccgagaaggaagaaccctcaggaaggcctgtaca
atgaactgcagaaagataagatggcggaggcctacagtgagattgggatgaaaggcgagcgccggaggggcaaggggcac
gatggcctttaccagggtctcagtacagccaccaaggacacctacgacgcccttcacatgcaggccctgccccctcgctg
ataa
(amino acids)
(SEQ ID NO: 741)
MALPVTALLLPLALLLHAARPEVQLVESGGGLVKPGGSLRLSCAASGFTFSGYAMSWVRQAPGKGLEWVSTISSGGTYIY
YPDSVKGRFTISRDNAKNSLYLQMNSLRAEDTAVYYCARLGGDNYYEYFDVWGKGTTVTVSSGGGGSGGGGSGGGGSDIV
LTQSPASLAVSPGQRATITCRASKSVSTSGYSYMHWYQQKPGQPPKLLIYLASNLESGVPARFSGSGSGTDFTLTINPVE
ANDTANYYCQHSRELPFTFGGGTKVEIKRTESPKAQASSVPTAQPQAEGSLAKATTAPATTRNTGRGGEEKKKEKEKEEQ
EERETKTPIYIWAPLAGTCGVLLLSLVITLYCKRGRKKLLYIFKQPFMRPVQTTQEEDGCSCRFPEEEEGGCELRVKFSR
SADAPAYKQGQNQLYNELNLGRREEYDVLDKRRGRDPEMGGKPRRKNPQEGLYNELQKDKMAEAYSEIGMKGERRRGKGH
DGLYQGLSTATKDTYDALHMQALPPR**
CAR-T C2 X4/CD8/4-1BB/CD3z “X4” CAR58
N-CD8ls-huMNC2scFv- X4 linker- CD8 transmembrane- 4-1BB- CD3zeta-C
(DNA)
(SEQ ID NO: 742)
atggccttaccagtgaccgccttgctcctgccgctggccttgctgctccacgccgccaggccggaggtgcagctggtgga
gtctgggggaggcctggtcaagcctggggggtccctgagactctcctgtgcagcctctggattcaccttcagtggctatg
ccatgagctgggtccgccaggctccagggaaggggctggagtgggtctcaaccattagtagtggcggaacctacatatac
taccccgactcagtgaagggccgattcaccatctccagagacaacgccaagaactcactgtatctgcaaatgaacagcct
gagagccgaggacacggccgtgtattactgtgcgagacttgggggggataattactacgaatacttcgatgtctggggca
aagggaccacggtcaccgtctcctccggcggtggcggatccggcggtggcggatccggcggtggcggatccgacattgtg
ctgacccagtctccagcctccttggccgtgtctccaggacagagggccaccatcacctgcagagccagtaagagtgtcag
taccagcggatactcctacatgcactggtatcagcagaaaccaggacaacctcctaaactcctgatttacctggcatcca
atctggagagcggggtcccagccaggttcagcggcagtgggtctgggaccgatttcaccctcacaattaatcctgtggaa
gctaatgatactgcaaattattactgtcagcacagtagggagctgcctttcacattcggcggagggaccaaggtggagat
caaacgaactgacaagacgcacaccaagccacctaaaccagctccagaactgctcggaggtcctggcaccggaaccggag
gacctaccatcaaaccacctaagccacctaagcctgctcctaacctgctcggaggacctatctacatctgggcgcccttg
gccgggacttgtggggtccttctcctgtcactggttatcaccctttactgcaaacggggcagaaagaaactcctgtatat
attcaaacaaccatttatgagaccagtacaaactactcaagaggaagatggctgtagctgccgatttccagaagaagaag
aaggaggatgtgaactgagagtgaagttcagcaggagcgcagacgcccccgcgtacaagcagggccagaaccagctctat
aacgagctcaatctaggacgaagagaggagtacgatgttttggacaagagacgtggccgggaccctgagatggggggaaa
gccgagaaggaagaaccctcaggaaggcctgtacaatgaactgcagaaagataagatggcggaggcctacagtgagattg
ggatgaaaggcgagcgccggaggggcaaggggcacgatggcctttaccagggtctcagtacagccaccaaggacacctac
gacgcccttcacatgcaggccctgccccctcgctgataa
(amino acids)
(SEQ ID NO: 743)
MALPVTALLLPLALLLHAARPEVQLVESGGGLVKPGGSLRLSCAASGFTFSGYAMSWVRQAPGKGLEWVSTISSGGTYIY
YPDSVKGRFTISRDNAKNSLYLQMNSLRAEDTAVYYCARLGGDNYYEYFDVWGKGTTVTVSSGGGGSGGGGSGGGGSDIV
LTQSPASLAVSPGQRATITCRASKSVSTSGYSYMHWYQQKPGQPPKLLIYLASNLESGVPARFSGSGSGTDFTLTINPVE
ANDTANYYCQHSRELPFTFGGGTKVEIKRTDKTHTKPPKPAPELLGGPGTGTGGPTIKPPKPPKPAPNLLGGPIYIWAPL
AGTCGVLLLSLVITLYCKRGRKKLLYIFKQPFMRPVQTTQEEDGCSCRFPEEEEGGCELRVKFSRSADAPAYKQGQNQLY
NELNLGRREEYDVLDKRRGRDPEMGGKPRRKNPQEGLYNELQKDKMAEAYSEIGMKGERRRGKGHDGLYQGLSTATKDTY
DALHMQALPPR**
CAR-T E6 CD8/CD4/41BB/CD3z CAR37
N-CD8ls-huMNE6scFv- CD8ecd- CD4 transmembrane- 4-1BB- CD3zeta-C
(DNA)
(SEQ ID NO: 744)
atggccctgcccgtgaccgctttgctgctccccctggcgctgctgctgcacgccgccaggccagaggtccagctggttgag
agtggcggtgggctggttaagcctggcggctccctgcggctgagctgcgccgcgagtggatttactttcagccgatatggg
atgagttgggtgcggcaagctcccgggaagaggctggaatgggtctcaacaatctccggggggggcacttacatctattac
cccgactcagtcaaggggagatttaccatttcacgagacaacgctaagaataccctgtatttgcagatgaattctctgaga
gcagaggacacagctgtttactattgtacccgcgacaactatggcaggaactacgactacggtatggactattggggacaa
gggacattggttacagtgagcagtggcggcgggggcagcggaggaggaggcagcggtggcggaggcagcgagatagtgctc
acgcagtcacccgcgactctcagtctctcacctggggaacgagctaccctgacgtgctctgctacctcctcagtgtcatat
attcactggtatcagcaacggcccgggcagtcccctagattgctcatttatagtacctctaatctggcctcaggtatccct
gcacgattttctggatctggttcaggttctgattacaccctcactatctctagcctggagcctgaagactttgccgtttat
tactgccagcagaggtctagctccccattcacctttgggagtgggaccaaggttgaaattaaaacgacaaccccggccccc
agaccaccaacgccagcccccaccatcgccagccaacccctgtctctgagaccagaagcctgtaggcctgccgccggtgga
gctgtgcacacaagaggactggatttcgcctgtgatatggccctgattgtgctggggggcgtcgccggcctcctgcttttc
attgggctaggcatcttcttcaaaaggggccgcaaaaaactcctttacatttttaagcagccttttatgaggccagtacag
acgactcaagaggaagacgggtgctcatgccgctttcctgaggaggaggaaggagggtgcgaactgcgcgttaagttctcc
cgatcagccgacgcgcctgcttacaagcagggccagaaccaactgtacaacgagctgaatctcggtagacgggaagagtac
gacgtgttggacaaacggagaggccgcgacccagaaatgggcggcaagcctcgcaggaaaaacccccaggagggactgtac
aatgagttgcagaaagataagatggcagaagcttatagcgagatcggaatgaagggggaaaggagacgagggaaaggacac
gacggcctttatcagggcctgtccacagcaacaaaagatacgtatgacgccctccatatgcaggcacttccaccacggtga
taa
(amino acids)
(SEQ ID NO: 745)
MALPVTALLLPLALLLHAARPEVQLVESGGGLVKPGGSLRLSCAASGFTFSRYGMSWVRQAPGKRLEWVSTISGGGTYIY
YPDSVKGRFTISRDNAKNTLYLQMNSLRAEDTAVYYCTRDNYGRNYDYGMDYWGQGTLVTVSSGGGGSGGGGSGGGGSEI
VLTQSPATLSLSPGERATLTCSATSSVSYIHWYQQRPGQSPRLLIYSTSNLASGIPARFSGSGSGSDYTLTISSLEPEDF
AVYYCQQRSSSPFTFGSGTKVEIKTTTPAPRPPTPAPTIASQPLSLRPEACRPAAGGAVHTRGLDFACDMALIVLGGVAG
LLLFIGLGIFFKRGRKKLLYIFKQPFMRPVQTTQEEDGCSCRFPEEEEGGCELRVKFSRSADAPAYKQGQNQLYNELNLG
RREEYDVLDKRRGRDPEMGGKPRRKNPQEGLYNELQKDKMAEAYSEIGMKGERRRGKGHDGLYQGLSTATKDTYDALHMQ
ALPPR**
CAR-T E6 CD4/CD4/CD3z sequence CAR23:
N-CD8ls-huMNE6scFv- CD4ecd- CD4 transmembrane- CD3zeta-C
(DNA)
(SEQ ID NO: 746)
atggccctgcccgtgaccgctttgctgctccccctggcgctgctgctgcacgccgccaggccagaggtccagctggttgag
agtggcggtgggctggttaagcctggcggctccctgcggctgagctgcgccgcgagtggatttactttcagccgatatggg
atgagttgggtgcggcaagctcccgggaagaggctggaatgggtctcaacaatctccggggggggcacttacatctattac
cccgactcagtcaaggggagatttaccatttcacgagacaacgctaagaataccctgtatttgcagatgaattctctgaga
gcagaggacacagctgtttactattgtacccgcgacaactatggcaggaactacgactacggtatggactattggggacaa
gggacattggttacagtgagcagtggcggcgggggcagcggaggaggaggcagcggtggggggggcagcgagatagtgctc
acgcagtcacccgcgactctcagtctctcacctggggaacgagctaccctgacgtgctctgctacctcctcagtgtcatat
attcactggtatcagcaacggcccgggcagtcccctagattgctcatttatagtacctctaatctggcctcaggtatccct
gcacgattttctggatctggttcaggttctgattacaccctcactatctctagcctggagcctgaagactttgccgtttat
tactgccagcagaggtctagctccccattcacctttgggagtgggaccaaggttgaaattaaatcgggacaggtcctgctg
gaatccaacatcaaggttctgcccacatggtccaccccggtgcagccaatggccctgattgtgctggggggcgtcgccggc
ctcctgcttttcattgggctaggcatcttcttccgcgttaagttctcccgatcagccgacgcgcctgcttacaagcagggc
cagaaccaactgtacaacgagctgaatctcggtagacgggaagagtacgacgtgttggacaaacggagaggccgcgaccca
gaaatgggcggcaagcctcgcaggaaaaacccccaggagggactgtacaatgagttgcagaaagataagatggcagaagct
tatagcgagatcggaatgaagggggaaaggagacgagggaaaggacacgacggcctttatcagggcctgtccacagcaaca
aaagatacgtatgacgccctccatatgcaggcacttccaccacggtgataa
(amino acids)
(SEQ ID NO: 747)
MALPVTALLLPLALLLHAARPEVQLVESGGGLVKPGGSLRLSCAASGFTFSRYGMSWVRQAPGKRLEWVSTISGGGTYIY
YPDSVKGRFTISRDNAKNTLYLQMNSLRAEDTAVYYCTRDNYGRNYDYGMDYWGQGTLVTVSSGGGGSGGGGSGGGGSEI
VLTQSPATLSLSPGERATLTCSATSSVSYIHWYQQRPGQSPRLLIYSTSNLASGIPARFSGSGSGSDYTLTISSLEPEDF
AVYYCQQRSSSPFTFGSGTKVEIKSGQVLLESNIKVLPTWSTPVQPMALIVLGGVAGLLLFIGLGIFFRVKFSRSADAPA
YKQGQNQLYNELNLGRREEYDVLDKRRGRDPEMGGKPRRKNPQEGLYNELQKDKMAEAYSEIGMKGERRRGKGHDGLYQG
LSTATKDTYDALHMQALPPR**
CAR-T E6 CD4/CD4/CD28/CD3z sequence CAR25:
N-CD8ls-huMNE6scFv- CD4ecd- CD4 transmembrane- CD28- CD3zeta-C
(DNA)
(SEQ ID NO: 748)
atggccctgcccgtgaccgctttgctgctccccctggcgctgctgctgcacgccgccaggccagaggtccagctggttgag
agtggcggtgggctggttaagcctggcggctccctgcggctgagctgcgccgcgagtggatttactttcagccgatatggg
atgagttgggtgcggcaagctcccgggaagaggctggaatgggtctcaacaatctccggggggggcacttacatctattac
cccgactcagtcaaggggagatttaccatttcacgagacaacgctaagaataccctgtatttgcagatgaattctctgaga
gcagaggacacagctgtttactattgtacccgcgacaactatggcaggaactacgactacggtatggactattggggacaa
gggacattggttacagtgagcagtggcggcgggggcagcggaggaggaggcagcggtggggggggcagcgagatagtgctc
acgcagtcacccgcgactctcagtctctcacctggggaacgagctaccctgacgtgctctgctacctcctcagtgtcatat
attcactggtatcagcaacggcccgggcagtcccctagattgctcatttatagtacctctaatctggcctcaggtatccct
gcacgattttctggatctggttcaggttctgattacaccctcactatctctagcctggagcctgaagactttgccgtttat
tactgccagcagaggtctagctccccattcacctttgggagtgggaccaaggttgaaattaaatcgggacaggtcctgctg
gaatccaacatcaaggttctgcccacatggtccaccccggtgcagccaatggccctgattgtgctggggggcgtcgccggc
ctcctgcttttcattgggctaggcatcttcttcagaagcaagcggtctcggctcctgcattctgattacatgaacatgacc
ccaagaagaccaggccccaccaggaaacattaccagccctacgctccgccacgcgacttcgctgcctaccggtcccgcgtt
aagttctcccgatcagccgacgcgcctgcttacaagcagggccagaaccaactgtacaacgagctgaatctcggtagacgg
gaagagtacgacgtgttggacaaacggagaggccgcgacccagaaatgggcggcaagcctcgcaggaaaaacccccaggag
ggactgtacaatgagttgcagaaagataagatggcagaagcttatagcgagatcggaatgaagggggaaaggagacgaggg
aaaggacacgacggcctttatcagggcctgtccacagcaacaaaagatacgtatgacgccctccatatgcaggcacttcca
ccacggtgataa
(amino acids)
(SEQ ID NO: 749)
MALPVTALLLPLALLLHAARPEVQLVESGGGLVKPGGSLRLSCAASGFTFSRYGMSWVRQAPGKRLEWVSTISGGGTYIY
YPDSVKGRFTISRDNAKNTLYLQMNSLRAEDTAVYYCTRDNYGRNYDYGMDYWGQGTLVTVSSGGGGSGGGGSGGGGSEI
VLTQSPATLSLSPGERATLTCSATSSVSYIHWYQQRPGQSPRLLIYSTSNLASGIPARFSGSGSGSDYTLTISSLEPEDF
AVYYCQQRSSSPFTFGSGTKVEIKSGQVLLESNIKVLPTWSTPVQPMALIVLGGVAGLLLFIGLGIFFRSKRSRLLHSDY
MNMTPRRPGPTRKHYQPYAPPRDFAAYRSRVKFSRSADAPAYKQGQNQLYNELNLGRREEYDVLDKRRGRDPEMGGKPRR
KNPQEGLYNELQKDKMAEAYSEIGMKGERRRGKGHDGLYQGLSTATKDTYDALHMQALPPR**
CAR-T E6 CD4/CD4/4-1BB/CD3z sequence CAR31:
N-CD8ls-huMNE6scFv- CD4ecd- CD4 transmembrane- 4-1BB- CD3zeta-C
(DNA)
(SEQ ID NO: 750)
atggccctgcccgtgaccgctttgctgctccccctggcgctgctgctgcacgccgccaggccagaggtccagctggttgag
agtggcggtgggctggttaagcctggcggctccctgcggctgagctgcgccgcgagtggatttactttcagccgatatggg
atgagttgggtgcggcaagctcccgggaagaggctggaatgggtctcaacaatctccggggggggcacttacatctattac
cccgactcagtcaaggggagatttaccatttcacgagacaacgctaagaataccctgtatttgcagatgaattctctgaga
gcagaggacacagctgtttactattgtacccgcgacaactatggcaggaactacgactacggtatggactattggggacaa
gggacattggttacagtgagcagtggcggcgggggcagcggaggaggaggcagcggtggggggggcagcgagatagtgctc
acgcagtcacccgcgactctcagtctctcacctggggaacgagctaccctgacgtgctctgctacctcctcagtgtcatat
attcactggtatcagcaacggcccgggcagtcccctagattgctcatttatagtacctctaatctggcctcaggtatccct
gcacgattttctggatctggttcaggttctgattacaccctcactatctctagcctggagcctgaagactttgccgtttat
tactgccagcagaggtctagctccccattcacctttgggagtgggaccaaggttgaaattaaatcgggacaggtcctgctg
gaatccaacatcaaggttctgcccacatggtccaccccggtgcagccaatggccctgattgtgctggggggcgtcgccggc
ctcctgcttttcattgggctaggcatcttcttcaaaaggggccgcaaaaaactcctttacatttttaagcagccttttatg
aggccagtacagacgactcaagaggaagacgggtgctcatgccgctttcctgaggaggaggaaggagggtgcgaactgcgc
gttaagttctcccgatcagccgacgcgcctgcttacaagcagggccagaaccaactgtacaacgagctgaatctcggtaga
cgggaagagtacgacgtgttggacaaacggagaggccgcgacccagaaatgggcggcaagcctcgcaggaaaaacccccag
gagggactgtacaatgagttgcagaaagataagatggcagaagcttatagcgagatcggaatgaagggggaaaggagacga
gggaaaggacacgacggcctttatcagggcctgtccacagcaacaaaagatacgtatgacgccctccatatgcaggcactt
ccaccacggtgataa
(amino acids)
(SEQ ID NO: 751)
MALPVTALLLPLALLLHAARPEVQLVESGGGLVKPGGSLRLSCAASGFTFSRYGMSWVRQAPGKRLEWVSTISGGGTYIY
YPDSVKGRFTISRDNAKNTLYLQMNSLRAEDTAVYYCTRDNYGRNYDYGMDYWGQGTLVTVSSGGGGSGGGGSGGGGSEI
VLTQSPATLSLSPGERATLTCSATSSVSYIHWYQQRPGQSPRLLIYSTSNLASGIPARFSGSGSGSDYTLTISSLEPEDF
AVYYCQQRSSSPFTFGSGTKVEIKSGQVLLESNIKVLPTWSTPVQPMALIVLGGVAGLLLFIGLGIFFKRGRKKLLYIFK
QPFMRPVQTTQEEDGCSCRFPEEEEGGCELRVKFSRSADAPAYKQGQNQLYNELNLGRREEYDVLDKRRGRDPEMGGKPR
RKNPQEGLYNELQKDKMAEAYSEIGMKGERRRGKGHDGLYQGLSTATKDTYDALHMQALPPR**
CAR-T E6 CD4/CD4/OX40/CD3z sequence:
N-CD8ls-huMNE6scFv- CD4ecd- CD4 transmembrane- OX40- CD3zeta-C
(DNA)
(SEQ ID NO: 752)
atggccctgcccgtgaccgctttgctgctccccctggcgctgctgctgcacgccgccaggccagaggtccagctggttga
gagtggcggtgggctggttaagcctggcggctccctgcggctgagctgcgccgcgagtggatttactttcagccgatatg
ggatgagttgggtgcggcaagctcccgggaagaggctggaatgggtctcaacaatctccggggggggcacttacatctat
taccccgactcagtcaaggggagatttaccatttcacgagacaacgctaagaataccctgtatttgcagatgaattctct
gagagcagaggacacagctgtttactattgtacccgcgacaactatggcaggaactacgactacggtatggactattggg
gacaagggacattggttacagtgagcagtggcggcgggggcagcggaggaggaggcagcggtggggggggcagcgagata
gtgctcacgcagtcacccgcgactctcagtctctcacctggggaacgagctaccctgacgtgctctgctacctcctcagt
gtcatatattcactggtatcagcaacggcccgggcagtcccctagattgctcatttatagtacctctaatctggcctcag
gtatccctgcacgattttctggatctggttcaggttctgattacaccctcactatctctagcctggagcctgaagacttt
gccgtttattactgccagcagaggtctagctccccattcacctttgggagtgggaccaaggttgaaattaaatcgggaca
ggtcctgctggaatccaacatcaaggttctgcccacatggtccaccccggtgcagccaatggccctgattgtgctggggg
gcgtcgccggcctcctgcttttcattgggctaggcatcttcttccggagggaccagaggctgccccccgatgcccacaag
ccccctgggggaggcagtttccggacccccatccaagaggagcaggccgacgcccactccaccctggccaagatccgcgt
taagttctcccgatcagccgacgcgcctgcttacaagcagggccagaaccaactgtacaacgagctgaatctcggtagac
gggaagagtacgacgtgttggacaaacggagaggccgcgacccagaaatgggcggcaagcctcgcaggaaaaacccccag
gagggactgtacaatgagttgcagaaagataagatggcagaagcttatagcgagatcggaatgaagggggaaaggagacg
agggaaaggacacgacggcctttatcagggcctgtccacagcaacaaaagatacgtatgacgccctccatatgcaggcac
ttccaccacggtgataa
(amino acids)
(SEQ ID NO: 753)
MALPVTALLLPLALLLHAARPEVQLVESGGGLVKPGGSLRLSCAASGFTFSRYGMSWVRQAPGKRLEWVSTISGGGTYIY
YPDSVKGRFTISRDNAKNTLYLQMNSLRAEDTAVYYCTRDNYGRNYDYGMDYWGQGTLVTVSSGGGGSGGGGSGGGGSEI
VLTQSPATLSLSPGERATLTCSATSSVSYIHWYQQRPGQSPRLLIYSTSNLASGIPARFSGSGSGSDYTLTISSLEPEDF
AVYYCQQRSSSPFTFGSGTKVEIKSGQVLLESNIKVLPTWSTPVQPMALIVLGGVAGLLLFIGLGIFFRRDQRLPPDAHK
PPGGGSFRTPIQEEQADAHSTLAKIRVKFSRSADAPAYKQGQNQLYNELNLGRREEYDVLDKRRGRDPEMGGKPRRKNPQ
EGLYNELQKDKMAEAYSEIGMKGERRRGKGHDGLYQGLSTATKDTYDALHMQALPPR**
CAR-T E6 CD4/CD4/CD28/4-1BB/CD3z sequence CAR38:
N-CD8ls-huMNE6scFv- CD4ecd- CD4 transmembrane- CD28- 4-1BB- CD3zeta-C
(DNA)
(SEQ ID NO: 754)
atggccctgcccgtgaccgctttgctgctccccctggcgctgctgctgcacgccgccaggccagaggtccagctggttgag
agtggcggtgggctggttaagcctggcggctccctgcggctgagctgcgccgcgagtggatttactttcagccgatatggg
atgagttgggtgcggcaagctcccgggaagaggctggaatgggtctcaacaatctccggggggggcacttacatctattac
cccgactcagtcaaggggagatttaccatttcacgagacaacgctaagaataccctgtatttgcagatgaattctctgaga
gcagaggacacagctgtttactattgtacccgcgacaactatggcaggaactacgactacggtatggactattggggacaa
gggacattggttacagtgagcagtggcggcgggggcagcggaggaggaggcagcggtggggggggcagcgagatagtgctc
acgcagtcacccgcgactctcagtctctcacctggggaacgagctaccctgacgtgctctgctacctcctcagtgtcatat
attcactggtatcagcaacggcccgggcagtcccctagattgctcatttatagtacctctaatctggcctcaggtatccct
gcacgattttctggatctggttcaggttctgattacaccctcactatctctagcctggagcctgaagactttgccgtttat
tactgccagcagaggtctagctccccattcacctttgggagtgggaccaaggttgaaattaaatcgggacaggtcctgctg
gaatccaacatcaaggttctgcccacatggtccaccccggtgcagccaatggccctgattgtgctggggggcgtcgccggc
ctcctgcttttcattgggctaggcatcttcttcagaagcaagcggtctcggctcctgcattctgattacatgaacatgacc
ccaagaagaccaggccccaccaggaaacattaccagccctacgctccgccacgcgacttcgctgcctaccggtccaaaagg
ggccgcaaaaaactcctttacatttttaagcagccttttatgaggccagtacagacgactcaagaggaagacgggtgctca
tgccgctttcctgaggaggaggaaggagggtgcgaactgcgcgttaagttctcccgatcagccgacgcgcctgcttacaag
cagggccagaaccaactgtacaacgagctgaatctcggtagacgggaagagtacgacgtgttggacaaacggagaggccgc
gacccagaaatgggcggcaagcctcgcaggaaaaacccccaggagggactgtacaatgagttgcagaaagataagatggca
gaagcttatagcgagatcggaatgaagggggaaaggagacgagggaaaggacacgacggcctttatcagggcctgtccaca
gcaacaaaagatacgtatgacgccctccatatgcaggcacttccaccacggtgataa
(amino acids)
(SEQ ID NO: 755)
MALPVTALLLPLALLLHAARPEVQLVESGGGLVKPGGSLRLSCAASGFTFSRYGMSWVRQAPGKRLEWVSTISGGGTYIY
YPDSVKGRFTISRDNAKNTLYLQMNSLRAEDTAVYYCTRDNYGRNYDYGMDYWGQGTLVTVSSGGGGSGGGGSGGGGSEI
VLTQSPATLSLSPGERATLTCSATSSVSYIHWYQQRPGQSPRLLIYSTSNLASGIPARFSGSGSGSDYTLTISSLEPEDF
AVYYCQQRSSSPFTFGSGTKVEIKSGQVLLESNIKVLPTWSTPVQPMALIVLGGVAGLLLFIGLGIFFRSKRSRLLHSDY
MNMTPRRPGPTRKHYQPYAPPRDFAAYRSKRGRKKLLYIFKQPFMRPVQTTQEEDGCSCRFPEEEEGGCELRVKFSRSAD
APAYKQGQNQLYNELNLGRREEYDVLDKRRGRDPEMGGKPRRKNPQEGLYNELQKDKMAEAYSEIGMKGERRRGKGHDGL
YQGLSTATKDTYDALHMQALPPR**
CAR-T E6 CD4/CD4/CD28/OX40/CD3z sequence:
N-CD8ls-huMNE6scFv- CD4ecd- CD4 transmembrane- CD28- OX40- CD3zeta-C
(DNA)
(SEQ ID NO: 756)
atggccctgcccgtgaccgctttgctgctccccctggcgctgctgctgcacgccgccaggccagaggtccagctggttga
gagtggcggtgggctggttaagcctggcggctccctgcggctgagctgcgccgcgagtggatttactttcagccgatatg
ggatgagttgggtgcggcaagctcccgggaagaggctggaatgggtctcaacaatctccggggggggcacttacatctat
taccccgactcagtcaaggggagatttaccatttcacgagacaacgctaagaataccctgtatttgcagatgaattctct
gagagcagaggacacagctgtttactattgtacccgcgacaactatggcaggaactacgactacggtatggactattggg
gacaagggacattggttacagtgagcagtggcggcgggggcagcggaggaggaggcagcggtggggggggcagcgagata
gtgctcacgcagtcacccgcgactctcagtctctcacctggggaacgagctaccctgacgtgctctgctacctcctcagt
gtcatatattcactggtatcagcaacggcccgggcagtcccctagattgctcatttatagtacctctaatctggcctcag
gtatccctgcacgattttctggatctggttcaggttctgattacaccctcactatctctagcctggagcctgaagacttt
gccgtttattactgccagcagaggtctagctccccattcacctttgggagtgggaccaaggttgaaattaaatcgggaca
ggtcctgctggaatccaacatcaaggttctgcccacatggtccaccccggtgcagccaatggccctgattgtgctggggg
gcgtcgccggcctcctgcttttcattgggctaggcatcttcttcagaagcaagcggtctcggctcctgcattctgattac
atgaacatgaccccaagaagaccaggccccaccaggaaacattaccagccctacgctccgccacgcgacttcgctgccta
ccggtcccggagggaccagaggctgccccccgatgcccacaagccccctgggggaggcagtttccggacccccatccaag
aggagcaggccgacgcccactccaccctggccaagatccgcgttaagttctcccgatcagccgacgcgcctgcttacaag
cagggccagaaccaactgtacaacgagctgaatctcggtagacgggaagagtacgacgtgttggacaaacggagaggccg
cgacccagaaatgggcggcaagcctcgcaggaaaaacccccaggagggactgtacaatgagttgcagaaagataagatgg
cagaagcttatagcgagatcggaatgaagggggaaaggagacgagggaaaggacacgacggcctttatcagggcctgtcc
acagcaacaaaagatacgtatgacgccctccatatgcaggcacttccaccacggtgataa
(amino acids)
(SEQ ID NO: 757)
MALPVTALLLPLALLLHAARPEVQLVESGGGLVKPGGSLRLSCAASGFTFSRYGMSWVRQAPGKRLEWVSTISGGGTYIY
YPDSVKGRFTISRDNAKNTLYLQMNSLRAEDTAVYYCTRDNYGRNYDYGMDYWGQGTLVTVSSGGGGSGGGGSGGGGSEI
VLTQSPATLSLSPGERATLTCSATSSVSYIHWYQQRPGQSPRLLIYSTSNLASGIPARFSGSGSGSDYTLTISSLEPEDF
AVYYCQQRSSSPFTFGSGTKVEIKSGQVLLESNIKVLPTWSTPVQPMALIVLGGVAGLLLFIGLGIFFRSKRSRLLHSDY
MNMTPRRPGPTRKHYQPYAPPRDFAAYRSRRDQRLPPDAHKPPGGGSFRTPIQEEQADAHSTLAKIRVKFSRSADAPAYK
QGQNQLYNELNLGRREEYDVLDKRRGRDPEMGGKPRRKNPQEGLYNELQKDKMAEAYSEIGMKGERRRGKGHDGLYQGLS
TATKDTYDALHMQALPPR**
CAR-T C2 CD4/CD4/CD3z sequence:
N-CD8ls-huMNC2scFv- CD4ecd- CD4 transmembrane- CD3zeta-C
(DNA)
(SEQ ID NO: 758)
atggccttgccagtgacggccctgctgctgccattggctcttctgttgcacgctgccaggcctgaagtgcagctcgtagag
agtggcgggggactggtgaagcccggtggaagcctcagactcagttgcgccgcctcaggtttcactttttcaggttacgcc
atgtcctgggtaagacaggcaccggggaaaggactcgagtgggtgtctactatcagctcaggaggcacttatatatattat
cctgactctgtaaaaggccgatttacgatttctcgcgacaatgcaaagaactccctctacctccaaatgaacagtcttagg
gcagaagacactgctgtatactattgtgcacgcctcggcggcgacaactactacgagtactttgacgtgtgggggaaaggg
actaccgtgacagtttcaagcggaggaggtggctcaggtggaggcgggtcaggggggggaggaagtgatattgtgctcaca
caatccccagcctccctggctgtgtctcccggccaacgcgctacaattacatgtcgggcctccaaaagcgtgagcaccagc
ggctacagctacatgcactggtatcaacagaaaccaggacaaccccccaaactgttgatttatctcgcttcaaacttggag
tccggcgtgcctgcgcgcttttcagggagtgggagcggcacagattttacgctgactatcaaccccgtagaagcaaacgat
acagcgaattattattgtcaacattcccgggaactcccctttacgttcggcgggggcacaaaggtcgaaattaagagaacc
tcgggacaggtcctgctggaatccaacatcaaggttctgcccacatggtccaccccggtgcagccaatggccctgattgtg
ctggggggcgtcgccggcctcctgcttttcattgggctaggcatcttcttccgcgttaagttctcccgatcagccgacgcg
cctgcttacaagcagggccagaaccaactgtacaacgagctgaatctcggtagacgggaagagtacgacgtgttggacaaa
cggagaggccgcgacccagaaatgggcggcaagcctcgcaggaaaaacccccaggagggactgtacaatgagttgcagaaa
gataagatggcagaagcttatagcgagatcggaatgaagggggaaaggagacgagggaaaggacacgacggcctttatcag
ggcctgtccacagcaacaaaagatacgtatgacgccctccatatgcaggcacttccaccacggtgataa
(amino acids)
(SEQ ID NO: 759)
MALPVTALLLPLALLLHAARPEVQLVESGGGLVKPGGSLRLSCAASGFTFSGYAMSWVRQAPGKGLEWVSTISSGGTYIY
YPDSVKGRFTISRDNAKNSLYLQMNSLRAEDTAVYYCARLGGDNYYEYFDVWGKGTTVTVSSGGGGSGGGGSGGGGSDIV
LTQSPASLAVSPGQRATITCRASKSVSTSGYSYMHWYQQKPGQPPKLLIYLASNLESGVPARFSGSGSGTDFTLTINPVE
ANDTANYYCQHSRELPFTFGGGTKVEIKRTSGQVLLESNIKVLPTWSTPVQPMALIVLGGVAGLLLFIGLGIFFRVKFSR
SADAPAYKQGQNQLYNELNLGRREEYDVLDKRRGRDPEMGGKPRRKNPQEGLYNELQKDKMAEAYSEIGMKGERRRGKGH
DGLYQGLSTATKDTYDALHMQALPPR**
CAR-T C2 CD4/CD4/CD28/CD3z sequence:
N-CD8ls-huMNC2scFv- CD4ecd- CD4 transmembrane- CD28- CD3zeta-C
(DNA)
(SEQ ID NO: 760)
atggccttgccagtgacggccctgctgctgccattggctcttctgttgcacgctgccaggcctgaagtgcagctcgtaga
gagtggcgggggactggtgaagcccggtggaagcctcagactcagttgcgccgcctcaggtttcactttttcaggttacg
ccatgtcctgggtaagacaggcaccggggaaaggactcgagtgggtgtctactatcagctcaggaggcacttatatatat
tatcctgactctgtaaaaggccgatttacgatttctcgcgacaatgcaaagaactccctctacctccaaatgaacagtct
tagggcagaagacactgctgtatactattgtgcacgcctcggcggcgacaactactacgagtactttgacgtgtggggga
aagggactaccgtgacagtttcaagcggaggaggtggctcaggtggaggcgggtcaggggggggaggaagtgatattgtg
ctcacacaatccccagcctccctggctgtgtctcccggccaacgcgctacaattacatgtcgggcctccaaaagcgtgag
caccagcggctacagctacatgcactggtatcaacagaaaccaggacaaccccccaaactgttgatttatctcgcttcaa
acttggagtccggcgtgcctgcgcgcttttcagggagtgggagcggcacagattttacgctgactatcaaccccgtagaa
gcaaacgatacagcgaattattattgtcaacattcccgggaactcccctttacgttcggcgggggcacaaaggtcgaaat
taagagaacctcgggacaggtcctgctggaatccaacatcaaggttctgcccacatggtccaccccggtgcagccaatgg
ccctgattgtgctggggggcgtcgccggcctcctgcttttcattgggctaggcatcttcttcagaagcaagcggtctcgg
ctcctgcattctgattacatgaacatgaccccaagaagaccaggccccaccaggaaacattaccagccctacgctccgcc
acgcgacttcgctgcctaccggtcccgcgttaagttctcccgatcagccgacgcgcctgcttacaagcagggccagaacc
aactgtacaacgagctgaatctcggtagacgggaagagtacgacgtgttggacaaacggagaggccgcgacccagaaatg
ggcggcaagcctcgcaggaaaaacccccaggagggactgtacaatgagttgcagaaagataagatggcagaagcttatag
cgagatcggaatgaagggggaaaggagacgagggaaaggacacgacggcctttatcagggcctgtccacagcaacaaaag
atacgtatgacgccctccatatgcaggcacttccaccacggtgataa
(amino acids)
(SEQ ID NO: 761)
MALPVTALLLPLALLLHAARPEVQLVESGGGLVKPGGSLRLSCAASGFTFSGYAMSWVRQAPGKGLEWVSTISSGGTYIY
YPDSVKGRFTISRDNAKNSLYLQMNSLRAEDTAVYYCARLGGDNYYEYFDVWGKGTTVTVSSGGGGSGGGGSGGGGSDIV
LTQSPASLAVSPGQRATITCRASKSVSTSGYSYMHWYQQKPGQPPKLLIYLASNLESGVPARFSGSGSGTDFTLTINPVE
ANDTANYYCQHSRELPFTFGGGTKVEIKRTSGQVLLESNIKVLPTWSTPVQPMALIVLGGVAGLLLFIGLGIFFRSKRSR
LLHSDYMNMTPRRPGPTRKHYQPYAPPRDFAAYRSRVKFSRSADAPAYKQGQNQLYNELNLGRREEYDVLDKRRGRDPEM
GGKPRRKNPQEGLYNELQKDKMAEAYSEIGMKGERRRGKGHDGLYQGLSTATKDTYDALHMQALPPR**
CAR-T C2 CD4/CD4/4-1BB/CD3z sequence:
N-CD8ls-huMNC2scFv- CD4ecd- CD4 transmembrane- 4-1BB- CD3zeta-C
(DNA)
(SEQ ID NO: 762)
atggccttgccagtgacggccctgctgctgccattggctcttctgttgcacgctgccaggcctgaagtgcagctcgtagag
agtggcgggggactggtgaagcccggtggaagcctcagactcagttgcgccgcctcaggtttcactttttcaggttacgcc
atgtcctgggtaagacaggcaccggggaaaggactcgagtgggtgtctactatcagctcaggaggcacttatatatattat
cctgactctgtaaaaggccgatttacgatttctcgcgacaatgcaaagaactccctctacctccaaatgaacagtcttagg
gcagaagacactgctgtatactattgtgcacgcctcggcggcgacaactactacgagtactttgacgtgtgggggaaaggg
actaccgtgacagtttcaagcggaggaggtggctcaggtggaggcgggtcaggggggggaggaagtgatattgtgctcaca
caatccccagcctccctggctgtgtctcccggccaacgcgctacaattacatgtcgggcctccaaaagcgtgagcaccagc
ggctacagctacatgcactggtatcaacagaaaccaggacaaccccccaaactgttgatttatctcgcttcaaacttggag
tccggcgtgcctgcgcgcttttcagggagtgggagcggcacagattttacgctgactatcaaccccgtagaagcaaacgat
acagcgaattattattgtcaacattcccgggaactcccctttacgttcggcgggggcacaaaggtcgaaattaagagaacc
tcgggacaggtcctgctggaatccaacatcaaggttctgcccacatggtccaccccggtgcagccaatggccctgattgtg
ctggggggcgtcgccggcctcctgcttttcattgggctaggcatcttcttcaaaaggggccgcaaaaaactcctttacatt
tttaagcagccttttatgaggccagtacagacgactcaagaggaagacgggtgctcatgccgctttcctgaggaggaggaa
ggagggtgcgaactgcgcgttaagttctcccgatcagccgacgcgcctgcttacaagcagggccagaaccaactgtacaac
gagctgaatctcggtagacgggaagagtacgacgtgttggacaaacggagaggccgcgacccagaaatgggcggcaagcct
cgcaggaaaaacccccaggagggactgtacaatgagttgcagaaagataagatggcagaagcttatagcgagatcggaatg
aagggggaaaggagacgagggaaaggacacgacggcctttatcagggcctgtccacagcaacaaaagatacgtatgacgcc
ctccatatgcaggcacttccaccacggtgataa
(amino acids)
(SEQ ID NO: 763)
MALPVTALLLPLALLLHAARPEVQLVESGGGLVKPGGSLRLSCAASGFTFSGYAMSWVRQAPGKGLEWVSTISSGGTYIY
YPDSVKGRFTISRDNAKNSLYLQMNSLRAEDTAVYYCARLGGDNYYEYFDVWGKGTTVTVSSGGGGSGGGGSGGGGSDIV
LTQSPASLAVSPGQRATITCRASKSVSTSGYSYMHWYQQKPGQPPKLLIYLASNLESGVPARFSGSGSGTDFTLTINPVE
ANDTANYYCQHSRELPFTFGGGTKVEIKRTSGQVLLESNIKVLPTWSTPVQPMALIVLGGVAGLLLFIGLGIFFKRGRKK
LLYIFKQPFMRPVQTTQEEDGCSCRFPEEEEGGCELRVKFSRSADAPAYKQGQNQLYNELNLGRREEYDVLDKRRGRDPE
MGGKPRRKNPQEGLYNELQKDKMAEAYSEIGMKGERRRGKGHDGLYQGLSTATKDTYDALHMQALPPR**
CAR-T C2 CD4/CD4/OX40/CD3z sequence:
N-CD8ls-huMNC2scFv- CD4ecd- CD4 transmembrane- OX40- CD3zeta-C
(DNA)
(SEQ ID NO: 764)
atggccttgccagtgacggccctgctgctgccattggctcttctgttgcacgctgccaggcctgaagtgcagctcgtaga
gagtggcgggggactggtgaagcccggtggaagcctcagactcagttgcgccgcctcaggtttcactttttcaggttacg
ccatgtcctgggtaagacaggcaccggggaaaggactcgagtgggtgtctactatcagctcaggaggcacttatatatat
tatcctgactctgtaaaaggccgatttacgatttctcgcgacaatgcaaagaactccctctacctccaaatgaacagtct
tagggcagaagacactgctgtatactattgtgcacgcctcggcggcgacaactactacgagtactttgacgtgtggggga
aagggactaccgtgacagtttcaagcggaggaggtggctcaggtggaggcgggtcaggggggggaggaagtgatattgtg
ctcacacaatccccagcctccctggctgtgtctcccggccaacgcgctacaattacatgtcgggcctccaaaagcgtgag
caccagcggctacagctacatgcactggtatcaacagaaaccaggacaaccccccaaactgttgatttatctcgcttcaa
acttggagtccggcgtgcctgcgcgcttttcagggagtgggagcggcacagattttacgctgactatcaaccccgtagaa
gcaaacgatacagcgaattattattgtcaacattcccgggaactcccctttacgttcggcgggggcacaaaggtcgaaat
taagagaacctcgggacaggtcctgctggaatccaacatcaaggttctgcccacatggtccaccccggtgcagccaatgg
ccctgattgtgctggggggcgtcgccggcctcctgcttttcattgggctaggcatcttcttccggagggaccagaggctg
ccccccgatgcccacaagccccctgggggaggcagtttccggacccccatccaagaggagcaggccgacgcccactccac
cctggccaagatccgcgttaagttctcccgatcagccgacgcgcctgcttacaagcagggccagaaccaactgtacaacg
agctgaatctcggtagacgggaagagtacgacgtgttggacaaacggagaggccgcgacccagaaatgggcggcaagcct
cgcaggaaaaacccccaggagggactgtacaatgagttgcagaaagataagatggcagaagcttatagcgagatcggaat
gaagggggaaaggagacgagggaaaggacacgacggcctttatcagggcctgtccacagcaacaaaagatacgtatgacg
ccctccatatgcaggcacttccaccacggtgataa
(amino acids)
(SEQ ID NO: 765)
MALPVTALLLPLALLLHAARPEVQLVESGGGLVKPGGSLRLSCAASGFTFSGYAMSWVRQAPGKGLEWVSTISSGGTYIY
YPDSVKGRFTISRDNAKNSLYLQMNSLRAEDTAVYYCARLGGDNYYEYFDVWGKGTTVTVSSGGGGSGGGGSGGGGSDIV
LTQSPASLAVSPGQRATITCRASKSVSTSGYSYMHWYQQKPGQPPKLLIYLASNLESGVPARFSGSGSGTDFTLTINPVE
ANDTANYYCQHSRELPFTFGGGTKVEIKRTSGQVLLESNIKVLPTWSTPVQPMALIVLGGVAGLLLFIGLGIFFRRDQRL
PPDAHKPPGGGSFRTPIQEEQADAHSTLAKIRVKFSRSADAPAYKQGQNQLYNELNLGRREEYDVLDKRRGRDPEMGGKP
RRKNPQEGLYNELQKDKMAEAYSEIGMKGERRRGKGHDGLYQGLSTATKDTYDALHMQALPPR**
CAR-T C2 CD4/CD4/CD28/4-1BB/CD3z sequence:
N-CD8ls-huMNC2scFv- CD4ecd- CD4 transmembrane- CD28- 4-1BB- CD3zeta-C
(DNA)
(SEQ ID NO: 766)
atggccttgccagtgacggccctgctgctgccattggctcttctgttgcacgctgccaggcctgaagtgcagctcgtaga
gagtggcgggggactggtgaagcccggtggaagcctcagactcagttgcgccgcctcaggtttcactttttcaggttacg
ccatgtcctgggtaagacaggcaccggggaaaggactcgagtgggtgtctactatcagctcaggaggcacttatatatat
tatcctgactctgtaaaaggccgatttacgatttctcgcgacaatgcaaagaactccctctacctccaaatgaacagtct
tagggcagaagacactgctgtatactattgtgcacgcctcggcggcgacaactactacgagtactttgacgtgtggggga
aagggactaccgtgacagtttcaagcggaggaggtggctcaggtggaggcgggtcaggggggggaggaagtgatattgtg
ctcacacaatccccagcctccctggctgtgtctcccggccaacgcgctacaattacatgtcgggcctccaaaagcgtgag
caccagcggctacagctacatgcactggtatcaacagaaaccaggacaaccccccaaactgttgatttatctcgcttcaa
acttggagtccggcgtgcctgcgcgcttttcagggagtgggagcggcacagattttacgctgactatcaaccccgtagaa
gcaaacgatacagcgaattattattgtcaacattcccgggaactcccctttacgttcggcgggggcacaaaggtcgaaat
taagagaacctcgggacaggtcctgctggaatccaacatcaaggttctgcccacatggtccaccccggtgcagccaatgg
ccctgattgtgctggggggcgtcgccggcctcctgcttttcattgggctaggcatcttcttcagaagcaagcggtctcgg
ctcctgcattctgattacatgaacatgaccccaagaagaccaggccccaccaggaaacattaccagccctacgctccgcc
acgcgacttcgctgcctaccggtccaaaaggggccgcaaaaaactcctttacatttttaagcagccttttatgaggccag
tacagacgactcaagaggaagacgggtgctcatgccgctttcctgaggaggaggaaggagggtgcgaactgcgcgttaag
ttctcccgatcagccgacgcgcctgcttacaagcagggccagaaccaactgtacaacgagctgaatctcggtagacggga
agagtacgacgtgttggacaaacggagaggccgcgacccagaaatgggcggcaagcctcgcaggaaaaacccccaggagg
gactgtacaatgagttgcagaaagataagatggcagaagcttatagcgagatcggaatgaagggggaaaggagacgaggg
aaaggacacgacggcctttatcagggcctgtccacagcaacaaaagatacgtatgacgccctccatatgcaggcacttcc
accacggtgataa
(amino acids)
(SEQ ID NO: 767)
MALPVTALLLPLALLLHAARPEVQLVESGGGLVKPGGSLRLSCAASGFTFSGYAMSWVRQAPGKGLEWVSTISSGGTYIY
YPDSVKGRFTISRDNAKNSLYLQMNSLRAEDTAVYYCARLGGDNYYEYFDVWGKGTTVTVSSGGGGSGGGGSGGGGSDIV
LTQSPASLAVSPGQRATITCRASKSVSTSGYSYMHWYQQKPGQPPKLLIYLASNLESGVPARFSGSGSGTDFTLTINPVE
ANDTANYYCQHSRELPFTFGGGTKVEIKRTSGQVLLESNIKVLPTWSTPVQPMALIVLGGVAGLLLFIGLGIFFRSKRSR
LLHSDYMNMTPRRPGPTRKHYQPYAPPRDFAAYRSKRGRKKLLYIFKQPFMRPVQTTQEEDGCSCRFPEEEEGGCELRVK
FSRSADAPAYKQGQNQLYNELNLGRREEYDVLDKRRGRDPEMGGKPRRKNPQEGLYNELQKDKMAEAYSEIGMKGERRRG
KGHDGLYQGLSTATKDTYDALHMQALPPR**
CAR-T C2 CD4/CD4/CD28/OX40/CD3z sequence:
N-CD8ls-huMNC2scFv- CD4ecd- CD4 transmembrane- CD28- OX40- CD3zeta-C
(DNA)
(SEQ ID NO: 768)
atggccttgccagtgacggccctgctgctgccattggctcttctgttgcacgctgccaggcctgaagtgcagctcgtaga
gagtggcgggggactggtgaagcccggtggaagcctcagactcagttgcgccgcctcaggtttcactttttcaggttacg
ccatgtcctgggtaagacaggcaccggggaaaggactcgagtgggtgtctactatcagctcaggaggcacttatatatat
tatcctgactctgtaaaaggccgatttacgatttctcgcgacaatgcaaagaactccctctacctccaaatgaacagtct
tagggcagaagacactgctgtatactattgtgcacgcctcggcggcgacaactactacgagtactttgacgtgtggggga
aagggactaccgtgacagtttcaagcggaggaggtggctcaggtggaggcgggtcaggggggggaggaagtgatattgtg
ctcacacaatccccagcctccctggctgtgtctcccggccaacgcgctacaattacatgtcgggcctccaaaagcgtgag
caccagcggctacagctacatgcactggtatcaacagaaaccaggacaaccccccaaactgttgatttatctcgcttcaa
acttggagtccggcgtgcctgcgcgcttttcagggagtgggagcggcacagattttacgctgactatcaaccccgtagaa
gcaaacgatacagcgaattattattgtcaacattcccgggaactcccctttacgttcggcgggggcacaaaggtcgaaat
taagagaacctcgggacaggtcctgctggaatccaacatcaaggttctgcccacatggtccaccccggtgcagccaatgg
ccctgattgtgctggggggcgtcgccggcctcctgcttttcattgggctaggcatcttcttcagaagcaagcggtctcgg
ctcctgcattctgattacatgaacatgaccccaagaagaccaggccccaccaggaaacattaccagccctacgctccgcc
acgcgacttcgctgcctaccggtcccggagggaccagaggctgccccccgatgcccacaagccccctgggggaggcagtt
tccggacccccatccaagaggagcaggccgacgcccactccaccctggccaagatccgcgttaagttctcccgatcagcc
gacgcgcctgcttacaagcagggccagaaccaactgtacaacgagctgaatctcggtagacgggaagagtacgacgtgtt
ggacaaacggagaggccgcgacccagaaatgggcggcaagcctcgcaggaaaaacccccaggagggactgtacaatgagt
tgcagaaagataagatggcagaagcttatagcgagatcggaatgaagggggaaaggagacgagggaaaggacacgacggc
ctttatcagggcctgtccacagcaacaaaagatacgtatgacgccctccatatgcaggcacttccaccacggtgataa
(amino acids)
(SEQ ID NO: 769)
MALPVTALLLPLALLLHAARPEVQLVESGGGLVKPGGSLRLSCAASGFTFSGYAMSWVRQAPGKGLEWVSTISSGGTYIY
YPDSVKGRFTISRDNAKNSLYLQMNSLRAEDTAVYYCARLGGDNYYEYFDVWGKGTTVTVSSGGGGSGGGGSGGGGSDIV
LTQSPASLAVSPGQRATITCRASKSVSTSGYSYMHWYQQKPGQPPKLLIYLASNLESGVPARFSGSGSGTDFTLTINPVE
ANDTANYYCQHSRELPFTFGGGTKVEIKRTSGQVLLESNIKVLPTWSTPVQPMALIVLGGVAGLLLFIGLGIFFRSKRSR
LLHSDYMNMTPRRPGPTRKHYQPYAPPRDFAAYRSRRDQRLPPDAHKPPGGGSFRTPIQEEQADAHSTLAKIRVKFSRSA
DAPAYKQGQNQLYNELNLGRREEYDVLDKRRGRDPEMGGKPRRKNPQEGLYNELQKDKMAEAYSEIGMKGERRRGKGHDG
LYQGLSTATKDTYDALHMQALPPR**
CAR-T E6 IgD/FC/CD8/4-1BB/CD3z
N-CD8ls-huMNE6scFv- IgD hinge- Human IgG1 Fc- CD8 transmembrane- 4-1BB- CD3zeta-
C
(DNA)
(SEQ ID NO: 770)
atggccctgcccgtgaccgctttgctgctccccctggcgctgctgctgcacgccgccaggccagaggtccagctggttgag
agtggcggtgggctggttaagcctggcggctccctgcggctgagctgcgccgcgagtggatttactttcagccgatatggg
atgagttgggtgcggcaagctcccgggaagaggctggaatgggtctcaacaatctccggggggggcacttacatctattac
cccgactcagtcaaggggagatttaccatttcacgagacaacgctaagaataccctgtatttgcagatgaattctctgaga
gcagaggacacagctgtttactattgtacccgcgacaactatggcaggaactacgactacggtatggactattggggacaa
gggacattggttacagtgagcagtggcggcgggggcagcggaggaggaggcagcggtggcggaggcagcgagatagtgctc
acgcagtcacccgcgactctcagtctctcacctggggaacgagctaccctgacgtgctctgctacctcctcagtgtcatat
attcactggtatcagcaacggcccgggcagtcccctagattgctcatttatagtacctctaatctggcctcaggtatccct
gcacgattttctggatctggttcaggttctgattacaccctcactatctctagcctggagcctgaagactttgccgtttat
tactgccagcagaggtctagctccccattcacctttgggagtgggaccaaggttgaaattaaagagtctccaaaggcacag
gcctcctcagtgcccactgcacaaccccaagcagagggcagcctcgccaaggcaaccacagccccagccaccacccgtaac
acaggaagaggcggcgaagagaagaaaaaggagaaggagaaagaggaacaagaagagagagagacaaagacaccagagccc
aaatcttgtgacaaaactcacacatgcccaccgtgcccagcacctgaactcctggggggaccgtcagtcttcctcttcccc
ccaaaacccaaggacaccctcatgatctcccggacccctgaggtcacatgcgtggtggtggacgtgagccacgaagaccct
gaggtcaagttcaactggtacgtggacggcgtggaggtgcataatgccaagacaaagccgcgggaggagcagtacaacagc
acgtaccgtgtggtcagcgtcctcaccgtcctgcaccaggactggctgaatggcaaggagtacaagtgcaaggtctccaac
aaagccctcccagcccccatcgagaaaaccatctccaaagccaaagggcagccccgagaaccacaggtgtacaccctgccc
ccatcccgggaggagatgaccaagaaccaggtcagcctgacctgcctggtcaaaggcttctatcccagcgacatcgccgtg
gagtgggagagcaatgggcagccggagaacaactacaagaccacgcctcccgtgctggactccgacggctccttcttcctc
tacagcaagctcaccgtggacaagagcaggtggcagcaggggaacgtcttctcatgctccgtgatgcatgaggctctgcac
aaccactacacgcagaagagcctctccctgtctccgggtaaaatctacatctgggcgcccttggccgggacttgtggggtc
cttctcctgtcactggttatcaccctttactgcaaacggggcagaaagaaactcctgtatatattcaaacaaccatttatg
agaccagtacaaactactcaagaggaagatggctgtagctgccgatttccagaagaagaagaaggaggatgtgaactgaga
gtgaagttcagcaggagcgcagacgcccccgcgtacaagcagggccagaaccagctctataacgagctcaatctaggacga
agagaggagtacgatgttttggacaagagacgtggccgggaccctgagatggggggaaagccgagaaggaagaaccctcag
gaaggcctgtacaatgaactgcagaaagataagatggcggaggcctacagtgagattgggatgaaaggcgagcgccggagg
ggcaaggggcacgatggcctttaccagggtctcagtacagccaccaaggacacctacgacgcccttcacatgcaggccctg
ccccctcgctgataa
(amino acids)
(SEQ ID NO: 771)
MALPVTALLLPLALLLHAARPEVQLVESGGGLVKPGGSLRLSCAASGFTFSRYGMSWVRQAPGKRLEWVSTISGGGTYIY
YPDSVKGRFTISRDNAKNTLYLQMNSLRAEDTAVYYCTRDNYGRNYDYGMDYWGQGTLVTVSSGGGGSGGGGSGGGGSEI
VLTQSPATLSLSPGERATLTCSATSSVSYIHWYQQRPGQSPRLLIYSTSNLASGIPARFSGSGSGSDYTLTISSLEPEDF
AVYYCQQRSSSPFTFGSGTKVEIKESPKAQASSVPTAQPQAEGSLAKATTAPATTRNTGRGGEEKKKEKEKEEQEERETK
TPEPKSCDKTHTCPPCPAPELLGGPSVFLFPPKPKDTLMISRTPEVTCVVVDVSHEDPEVKFNWYVDGVEVHNAKTKPRE
EQYNSTYRVVSVLTVLHQDWLNGKEYKCKVSNKALPAPIEKTISKAKGQPREPQVYTLPPSREEMTKNQVSLTCLVKGFY
PSDIAVEWESNGQPENNYKTTPPVLDSDGSFFLYSKLTVDKSRWQQGNVFSCSVMHEALHNHYTQKSLSLSPGKIYIWAP
LAGTCGVLLLSLVITLYCKRGRKKLLYIFKQPFMRPVQTTQEEDGCSCRFPEEEEGGCELRVKFSRSADAPAYKQGQNQL
YNELNLGRREEYDVLDKRRGRDPEMGGKPRRKNPQEGLYNELQKDKMAEAYSEIGMKGERRRGKGHDGLYQGLSTATKDT
YDALHMQALPPR**
CAR-T E6 IgD/FCHingeless Y407R/CD8/4-1BB/CD3z
N-CD8ls- huMNE6scFv- IgD hinge- Human IgG1 hingeless Fc Y407R- CD8
transmembrane- 4-1BB- CD3zeta-C
(DNA)
(SEQ ID NO: 772)
atggccctgcccgtgaccgctttgctgctccccctggcgctgctgctgcacgccgccaggccagaggtccagctggttgag
agtggcggtgggctggttaagcctggcggctccctgcggctgagctgcgccgcgagtggatttactttcagccgatatggg
atgagttgggtgcggcaagctcccgggaagaggctggaatgggtctcaacaatctccggggggggcacttacatctattac
cccgactcagtcaaggggagatttaccatttcacgagacaacgctaagaataccctgtatttgcagatgaattctctgaga
gcagaggacacagctgtttactattgtacccgcgacaactatggcaggaactacgactacggtatggactattggggacaa
gggacattggttacagtgagcagtggcggcgggggcagcggaggaggaggcagcggtggcggaggcagcgagatagtgctc
acgcagtcacccgcgactctcagtctctcacctggggaacgagctaccctgacgtgctctgctacctcctcagtgtcatat
attcactggtatcagcaacggcccgggcagtcccctagattgctcatttatagtacctctaatctggcctcaggtatccct
gcacgattttctggatctggttcaggttctgattacaccctcactatctctagcctggagcctgaagactttgccgtttat
tactgccagcagaggtctagctccccattcacctttgggagtgggaccaaggttgaaattaaagagtctccaaaggcacag
gcctcctcagtgcccactgcacaaccccaagcagagggcagcctcgccaaggcaaccacagccccagccaccacccgtaac
acaggaagaggcggcgaagagaagaaaaaggagaaggagaaagaggaacaagaagagagagagacaaagacaccagcacct
gaactcctggggggaccgtcagtcttcctcttccccccaaaacccaaggacaccctcatgatctcccggacccctgaggtc
acatgcgtggtggtggacgtgagccacgaagaccctgaggtcaagttcaactggtacgtggacggcgtggaggtgcataat
gccaagacaaagccgcgggaggagcagtacaacagcacgtaccgtgtggtcagcgtcctcaccgtcctgcaccaggactgg
ctgaatggcaaggagtacaagtgcaaggtctccaacaaagccctcccagcccccatcgagaaaaccatctccaaagccaaa
gggcagccccgagaaccacaggtgtacaccctgcccccatcccgggaggagatgaccaagaaccaggtcagcctgacctgc
ctggtcaaaggcttctatcccagcgacatcgccgtggagtgggagagcaatgggcagccggagaacaactacaagaccacg
cctcccgtgctggactccgacggctccttcttcctcaggagcaagctcaccgtggacaagagcaggtggcagcaggggaac
gtcttctcatgctccgtgatgcatgaggctctgcacaaccactacacgcagaagagcctctccctgtctccgggtaaaatc
tacatctgggcgcccttggccgggacttgtggggtccttctcctgtcactggttatcaccctttactgcaaacggggcaga
aagaaactcctgtatatattcaaacaaccatttatgagaccagtacaaactactcaagaggaagatggctgtagctgccga
tttccagaagaagaagaaggaggatgtgaactgagagtgaagttcagcaggagcgcagacgcccccgcgtacaagcagggc
cagaaccagctctataacgagctcaatctaggacgaagagaggagtacgatgttttggacaagagacgtggccgggaccct
gagatggggggaaagccgagaaggaagaaccctcaggaaggcctgtacaatgaactgcagaaagataagatggcggaggcc
tacagtgagattgggatgaaaggcgagcgccggaggggcaaggggcacgatggcctttaccagggtctcagtacagccacc
aaggacacctacgacgcccttcacatgcaggccctgccccctcgctgataa
(amino acids)
(SEQ ID NO: 773)
MALPVTALLLPLALLLHAARPEVQLVESGGGLVKPGGSLRLSCAASGFTFSRYGMSWVRQAPGKRLEWVSTISGGGTYIY
YPDSVKGRFTISRDNAKNTLYLQMNSLRAEDTAVYYCTRDNYGRNYDYGMDYWGQGTLVTVSSGGGGSGGGGSGGGGSEI
VLTQSPATLSLSPGERATLTCSATSSVSYIHWYQQRPGQSPRLLIYSTSNLASGIPARFSGSGSGSDYTLTISSLEPEDF
AVYYCQQRSSSPFTFGSGTKVEIKESPKAQASSVPTAQPQAEGSLAKATTAPATTRNTGRGGEEKKKEKEKEEQEERETK
TPAPELLGGPSVFLFPPKPKDTLMISRTPEVTCVVVDVSHEDPEVKFNWYVDGVEVHNAKTKPREEQYNSTYRVVSVLTV
LHQDWLNGKEYKCKVSNKALPAPIEKTISKAKGQPREPQVYTLPPSREEMTKNQVSLTCLVKGFYPSDIAVEWESNGQPE
NNYKTTPPVLDSDGSFFLRSKLTVDKSRWQQGNVFSCSVMHEALHNHYTQKSLSLSPGKIYIWAPLAGTCGVLLLSLVIT
LYCKRGRKKLLYIFKQPFMRPVQTTQEEDGCSCRFPEEEEGGCELRVKFSRSADAPAYKQGQNQLYNELNLGRREEYDVL
DKRRGRDPEMGGKPRRKNPQEGLYNELQKDKMAEAYSEIGMKGERRRGKGHDGLYQGLSTATKDTYDALHMQALPPR**
NFATc1P2-MMP9
(DNA)
(SEQ ID NO: 774)
caggcctggggacactcgcggcgggaagatttggaggggaggggagggggaggggcgtgggggcgcggcctcgctggagt
ccccctgaccccccgacccccgcccaccggcctgggcgtcctcccgcggcccctcctcccctcccggcgcccggtgctct
ggggcgcgtgccacgcctggctcggcgccgtaggggcccccgcaggtagagacccctggaaatggcctcgacgccgcagg
agcgaggcggccaccaccccgctaatccgggcacgtctctccaggccgaggcctgcggtggaaaagccggggttccattt
gtgctgagtcggggcggccgaatggagccaggcctcgggacgcgggacggacgggctctggccgcgcaccttcgcgggct
ctgcagcgcccgaccgcctcccccggcagggaggaggcgcttgtggggggcacccacggggcacagtgatccctgggggt
ctgcggacctcctgggccccgcagcagacacgagtttagcctttgggtttagtttaaatcacataagggtgtcgtgcaat
cgatttatggtttctacacaccagacactttaacctccaaccccccccatccaaagccaacaagaaaatgcggtgccgtg
ttggcagctgagctgcgcccgaagagacgcagggagacgtaagagaggaaagtgtgagtggccggggggcctccccccgt
cagaagtcgcgcagtcgcgcccataaaacgccccctccgggcggctagggcaggtgagcgcgtccccgggcctccccacg
ccggcccctgccacaggccgtctaggtcgagcagatatttacagaataaaaatgacaataactcgacgtcccgggacggc
cacgcaatctgttagtaatttagcgggatgggaatttcctttctagggcctgccagtgaagcgcttttccaaatttccac
agcgggggaagcctgcgattttacataatgacttcagcatgccgggctttctcgacacccctccccggcccccggccccc
gccccccgccccttttccagcagggccgggctccctccggacacccgcgtggactcaggcgtcccgtctggcccgttcgc
ccccgtttcccccgccagccccagcgcccccctgcccggcccccggattccccgttcccgcccctacgcccccatcccct
ccccgtgcgcccctccccgtgcgcccccctccccgtgcgccccccctccccgtgcgcccccctccccgtgcgccccccct
ccccgggcgcccccctccccgggcgccccccctccccgtgcgcccccccctccccgtgcgccccccctccccgtgcgcgc
cccgcctcttgcgcccctgcccccaggcgagcggctgccgcggcgcggggaggggcgggcgctcggcgactcgtccccgg
ggccccgcgcgggcccgggcagcaggggcgtgatgtcacggcagggagggggcgcgggagccgccgggccggcggggagg
cgggggaggtgttttccagctttaaaaaggcaggaggcagagcgcggccctgcgtcagagcgagactcagaggctccgaa
ctcgccggcggagtcgccgcgccagatcccagcagcagggcgcggaagcttctctcgacattcgtttctagagccaccat
gagcctctggcagcccctggtcctggtgctcctggtgctgggctgctgctttgctgcccccagacagcgccagtccaccct
tgtgctcttccctggagacctgagaaccaatctcaccgacaggcagctggcagaggaatacctgtaccgctatggttacac
tcgggtggcagagatgcgtggagagtcgaaatctctggggcctgcgctgctgcttctccagaagcaactgtccctgcccga
gaccggtgagctggatagcgccacgctgaaggccatgcgaaccccacggtgcggggtcccagacctgggcagattccaaac
ctttgagggcgacctcaagtggcaccaccacaacatcacctattggatccaaaactactcggaagacttgccgcgggcggt
gattgacgacgcctttgcccgcgccttcgcactgtggagcgcggtgacgccgctcaccttcactcgcgtgtacagccggga
cgcagacatcgtcatccagtttggtgtcgcggagcacggagacgggtatcccttcgacgggaaggacgggctcctggcaca
cgcctttcctcctggccccggcattcagggagacgcccatttcgacgatgacgagttgtggtccctgggcaagggcgtcgt
ggttccaactcggtttggaaacgcagatggcgcggcctgccacttccccttcatcttcgagggccgctcctactctgcctg
caccaccgacggtcgctccgacggcttgccctggtgcagtaccacggccaactacgacaccgacgaccggtttggcttctg
ccccagcgagagactctacacccaggacggcaatgctgatgggaaaccctgccagtttccattcatcttccaaggccaatc
ctactccgcctgcaccacggacggtcgctccgacggctaccgctggtgcgccaccaccgccaactacgaccgggacaagct
cttcggcttctgcccgacccgagctgactcgacggtgatggggggcaactcggcgggggagctgtgcgtcttccccttcac
tttcctgggtaaggagtactcgacctgtaccagcgagggccgcggagatgggcgcctctggtgcgctaccacctcgaactt
tgacagcgacaagaagtggggcttctgcccggaccaaggatacagtttgttcctcgtggcggcgcatgagttcggccacgc
gctgggcttagatcattcctcagtgccggaggcgctcatgtaccctatgtaccgcttcactgaggggccccccttgcataa
ggacgacgtgaatggcatccggcacctctatggtcctcgccctgaacctgagccacggcctccaaccaccaccacaccgca
gcccacggctcccccgacggtctgccccaccggaccccccactgtccacccctcagagcgccccacagctggccccacagg
tcccccctcagctggccccacaggtccccccactgctggcccttctacggccactactgtgcctttgagtccggtggacga
tgcctgcaacgtgaacatcttcgacgccatcgcggagattgggaaccagctgtatttgttcaaggatgggaagtactggcg
attctctgagggcagggggagccggccgcagggccccttccttatcgccgacaagtggcccgcgctgccccgcaagctgga
ctcggtctttgaggagcggctctccaagaagcttttcttcttctctgggcgccaggtgtgggtgtacacaggcgcgtcggt
gctgggcccgaggcgtctggacaagctgggcctgggagccgacgtggcccaggtgaccggggccctccggagtggcagggg
gaagatgctgctgttcagcgggcggcgcctctggaggttcgacgtgaaggcgcagatggtggatccccggagcgccagcga
ggtggaccggatgttccccggggtgcctttggacacgcacgacgtcttccagtaccgagagaaagcctatttctgccagga
ccgcttctactggcgcgtgagttcccggagtgagttgaaccaggtggaccaagtgggctacgtgacctatgacatcctgca
gtgccctgaggacgattacaaggatgacgacgataagtgataa
NFATc1P2-MMP9cat
(DNA)
(SEQ ID NO: 775)
caggcctggggacactcgcggcgggaagatttggaggggaggggagggggaggggcgtgggggcgcggcctcgctggagt
ccccctgaccccccgacccccgcccaccggcctgggcgtcctcccgcggcccctcctcccctcccggcgcccggtgctct
ggggcgcgtgccacgcctggctcggcgccgtaggggcccccgcaggtagagacccctggaaatggcctcgacgccgcagg
agcgaggcggccaccaccccgctaatccgggcacgtctctccaggccgaggcctgcggtggaaaagccggggttccattt
gtgctgagtcggggcggccgaatggagccaggcctcgggacgcgggacggacgggctctggccgcgcaccttcgcgggct
ctgcagcgcccgaccgcctcccccggcagggaggaggcgcttgtggggggcacccacggggcacagtgatccctgggggt
ctgcggacctcctgggccccgcagcagacacgagtttagcctttgggtttagtttaaatcacataagggtgtcgtgcaat
cgatttatggtttctacacaccagacactttaacctccaaccccccccatccaaagccaacaagaaaatgcggtgccgtg
ttggcagctgagctgcgcccgaagagacgcagggagacgtaagagaggaaagtgtgagtggccggggggcctccccccgt
cagaagtcgcgcagtcgcgcccataaaacgccccctccgggcggctagggcaggtgagcgcgtccccgggcctccccacg
ccggcccctgccacaggccgtctaggtcgagcagatatttacagaataaaaatgacaataactcgacgtcccgggacggc
cacgcaatctgttagtaatttagcgggatgggaatttcctttctagggcctgccagtgaagcgcttttccaaatttccac
agcgggggaagcctgcgattttacataatgacttcagcatgccgggctttctcgacacccctccccggcccccggccccc
gccccccgccccttttccagcagggccgggctccctccggacacccgcgtggactcaggcgtcccgtctggcccgttcgc
ccccgtttcccccgccagccccagcgcccccctgcccggcccccggattccccgttcccgcccctacgcccccatcccct
ccccgtgcgcccctccccgtgcgcccccctccccgtgcgccccccctccccgtgcgcccccctccccgtgcgccccccct
ccccgggcgcccccctccccgggcgccccccctccccgtgcgcccccccctccccgtgcgccccccctccccgtgcgcgc
cccgcctcttgcgcccctgcccccaggcgagcggctgccgcggcgcggggaggggcgggcgctcggcgactcgtccccgg
ggccccgcgcgggcccgggcagcaggggcgtgatgtcacggcagggagggggcgcgggagccgccgggccggcggggagg
cgggggaggtgttttccagctttaaaaaggcaggaggcagagcgcggccctgcgtcagagcgagactcagaggctccgaa
ctcgccggcggagtcgccgcgccagatcccagcagcagggcgcggaagcttctctcgacattcgtttctagagccaccat
gagcctctggcagcccctggtcctggtgctcctggtgctgggctgctgctttgctttccaaacctttgagggcgacctcaa
gtggcaccaccacaacatcacctattggatccaaaactactcggaagacttgccgcgggcggtgattgacgacgcctttgc
ccgcgccttcgcactgtggagcgcggtgacgccgctcaccttcactcgcgtgtacagccgggacgcagacatcgtcatcca
gtttggtgtcgcggagcacggagacgggtatcccttcgacgggaaggacgggctcctggcacacgcctttcctcctggccc
cggcattcagggagacgcccatttcgacgatgacgagttgtggtccctgggcaagggcgtcgtggttccaactcggtttgg
aaacgcagatggcgcggcctgccacttccccttcatcttcgagggccgctcctactctgcctgcaccaccgacggtcgctc
cgacggcttgccctggtgcagtaccacggccaactacgacaccgacgaccggtttggcttctgccccagcgagagactcta
cacccaggacggcaatgctgatgggaaaccctgccagtttccattcatcttccaaggccaatcctactccgcctgcaccac
ggacggtcgctccgacggctaccgctggtgcgccaccaccgccaactacgaccgggacaagctcttcggcttctgcccgac
ccgagctgactcgacggtgatggggggcaactcggcgggggagctgtgcgtcttccccttcactttcctgggtaaggagta
ctcgacctgtaccagcgagggccgcggagatgggcgcctctggtgcgctaccacctcgaactttgacagcgacaagaagtg
gggcttctgcccggaccaaggatacagtttgttcctcgtggcggcgcatgagttcggccacgcgctgggcttagatcattc
ctcagtgccggaggcgctcatgtaccctatgtaccgcttcactgaggggccccccttgcataaggacgacgtgaatggcat
ccggcacctctatggtcctcgccctgaacctgattacaaggatgacgacgataagtgataa
NFAT response element 2
(DNA)
(SEQ ID NO: 776)
aagaggaaaatttgtttcatacagaaggcgtt
NFAT response element 2 repeats
(DNA)
(SEQ ID NO: 777)
aagaggaaaatttgtttcatacagaaggcgttaagaggaaaatttgtttcatacagaaggcgttaagaggaaaatttgttt
catacagaaggcgttaagaggaaaatttgtttcatacagaaggcgtt
CMV minimal promoter 2
(DNA)
(SEQ ID NO: 778)
taggcgtgtacggtgggaggcctatataagcagagctcgtttagtgaaccgtcagatcgcctggagacgccatccacgctg
ttttgacctccatagaagacaccgggaccgatccagc
NFATRE2mCMV2-MMP9
(DNA)
(SEQ ID NO: 779)
aagaggaaaatttgtttcatacagaaggcgttaagaggaaaatttgtttcatacagaaggcgttaagaggaaaatttgttt
catacagaaggcgttaagaggaaaatttgtttcatacagaaggcgttactagttaggcgtgtacggtgggaggcctatata
agcagagctcgtttagtgaaccgtcagatcgcctggagacgccatccacgctgttttgacctccatagaagacaccgggac
cgatccagcctctcgacattcgtttctagagccaccatgagcctctggcagcccctggtcctggtgctcctggtgctgggc
tgctgctttgctgcccccagacagcgccagtccacccttgtgctcttccctggagacctgagaaccaatctcaccgacagg
cagctggcagaggaatacctgtaccgctatggttacactcgggtggcagagatgcgtggagagtcgaaatctctggggcct
gcgctgctgcttctccagaagcaactgtccctgcccgagaccggtgagctggatagcgccacgctgaaggccatgcgaacc
ccacggtgcggggtcccagacctgggcagattccaaacctttgagggcgacctcaagtggcaccaccacaacatcacctat
tggatccaaaactactcggaagacttgccgcgggcggtgattgacgacgcctttgcccgcgccttcgcactgtggagcgcg
gtgacgccgctcaccttcactcgcgtgtacagccgggacgcagacatcgtcatccagtttggtgtcgcggagcacggagac
gggtatcccttcgacgggaaggacgggctcctggcacacgcctttcctcctggccccggcattcagggagacgcccatttc
gacgatgacgagttgtggtccctgggcaagggcgtcgtggttccaactcggtttggaaacgcagatggcgcggcctgccac
ttccccttcatcttcgagggccgctcctactctgcctgcaccaccgacggtcgctccgacggcttgccctggtgcagtacc
acggccaactacgacaccgacgaccggtttggcttctgccccagcgagagactctacacccaggacggcaatgctgatggg
aaaccctgccagtttccattcatcttccaaggccaatcctactccgcctgcaccacggacggtcgctccgacggctaccgc
tggtgcgccaccaccgccaactacgaccgggacaagctcttcggcttctgcccgacccgagctgactcgacggtgatgggg
ggcaactcggcgggggagctgtgcgtcttccccttcactttcctgggtaaggagtactcgacctgtaccagcgagggccgc
ggagatgggcgcctctggtgcgctaccacctcgaactttgacagcgacaagaagtggggcttctgcccggaccaaggatac
agtttgttcctcgtggcggcgcatgagttcggccacgcgctgggcttagatcattcctcagtgccggaggcgctcatgtac
cctatgtaccgcttcactgaggggccccccttgcataaggacgacgtgaatggcatccggcacctctatggtcctcgccct
gaacctgagccacggcctccaaccaccaccacaccgcagcccacggctcccccgacggtctgccccaccggaccccccact
gtccacccctcagagcgccccacagctggccccacaggtcccccctcagctggccccacaggtccccccactgctggccct
tctacggccactactgtgcctttgagtccggtggacgatgcctgcaacgtgaacatcttcgacgccatcgcggagattggg
aaccagctgtatttgttcaaggatgggaagtactggcgattctctgagggcagggggagccggccgcagggccccttcctt
atcgccgacaagtggcccgcgctgccccgcaagctggactcggtctttgaggagcggctctccaagaagcttttcttcttc
tctgggcgccaggtgtgggtgtacacaggcgcgtcggtgctgggcccgaggcgtctggacaagctgggcctgggagccgac
gtggcccaggtgaccggggccctccggagtggcagggggaagatgctgctgttcagcgggcggcgcctctggaggttcgac
gtgaaggcgcagatggtggatccccggagcgccagcgaggtggaccggatgttccccggggtgcctttggacacgcacgac
gtcttccagtaccgagagaaagcctatttctgccaggaccgcttctactggcgcgtgagttcccggagtgagttgaaccag
gtggaccaagtgggctacgtgacctatgacatcctgcagtgccctgaggacgattacaaggatgacgacgataagtgataa
NFATRE2mCMV2-MMP9cat
(DNA)
(SEQ ID NO: 780)
aagaggaaaatttgtttcatacagaaggcgttaagaggaaaatttgtttcatacagaaggcgttaagaggaaaatttgttt
catacagaaggcgttaagaggaaaatttgtttcatacagaaggcgttactagttaggcgtgtacggtgggaggcctatata
agcagagctcgtttagtgaaccgtcagatcgcctggagacgccatccacgctgttttgacctccatagaagacaccgggac
cgatccagcctcgagctctcgacattcgtttctagagccaccatgagcctctggcagcccctggtcctggtgctcctggtg
ctgggctgctgctttgctttccaaacctttgagggcgacctcaagtggcaccaccacaacatcacctattggatccaaaac
tactcggaagacttgccgcgggcggtgattgacgacgcctttgcccgcgccttcgcactgtggagcgcggtgacgccgctc
accttcactcgcgtgtacagccgggacgcagacatcgtcatccagtttggtgtcgcggagcacggagacgggtatcccttc
gacgggaaggacgggctcctggcacacgcctttcctcctggccccggcattcagggagacgcccatttcgacgatgacgag
ttgtggtccctgggcaagggcgtcgtggttccaactcggtttggaaacgcagatggcgcggcctgccacttccccttcatc
ttcgagggccgctcctactctgcctgcaccaccgacggtcgctccgacggcttgccctggtgcagtaccacggccaactac
gacaccgacgaccggtttggcttctgccccagcgagagactctacacccaggacggcaatgctgatgggaaaccctgccag
tttccattcatcttccaaggccaatcctactccgcctgcaccacggacggtcgctccgacggctaccgctggtgcgccacc
accgccaactacgaccgggacaagctcttcggcttctgcccgacccgagctgactcgacggtgatggggggcaactcggcg
ggggagctgtgcgtcttccccttcactttcctgggtaaggagtactcgacctgtaccagcgagggccgcggagatgggcgc
ctctggtgcgctaccacctcgaactttgacagcgacaagaagtggggcttctgcccggaccaaggatacagtttgttcctc
gtggcggcgcatgagttcggccacgcgctgggcttagatcattcctcagtgccggaggcgctcatgtaccctatgtaccgc
ttcactgaggggccccccttgcataaggacgacgtgaatggcatccggcacctctatggtcctcgccctgaacctgattac
aaggatgacgacgataagtgataa
NFATc1 Promoter fragment (P1)
(DNA)
(SEQ ID NO: 781)
aggcaggaggaagaggaaaggggcgcagggcgctcggggagcagagccgggggcccgcggtggccgcagaggccgggccgg
ggcgcagaggccgggcgagctggccgcgctctgggccgccgcctccggaactccctgcgcctggcgcgcggccaccgtgg
tcccggcaacggcattaaacagagggaaacagacccgggattccgtcacccgggcggggggataaggacggctttgagag
cagacaggaaaagggagcttttctgcatggggtgaaaaaattatttattgaaggaggaggaggcggcagcggaggaaggg
gaggggcgggaggaggaggaagagccggccgcccccgccccggccccggctcctcaggagccaagggcagcctcgccagg
tcggtcccgggctcgaggaccgcggctggggtcgaggggctcagtctcccacgtgaccggctgggcgcgccccgccagac
ccggcctcgggattccctcctcccggcgagtctccgcccgccccgtcctggaggtggggagaaggagggcggggcggggg
ggacggaaactctccccgccaaatcctggccccaggcctggggacactcgcggcgggaagatttggaggggaggggaggg
ggaggggcgtgggggcgcggcctcgctggagtccccctgaccccccgacccccgcccaccggcctgggcgtcctcccgcg
gcccctcctcccctcccggcgcccggtgctctggggcgcgtgccacgcctggctcggcgccgtaggggcccccgcaggta
gagacccctggaaatggcctcgacgccgcaggagcgaggcggccaccaccccgctaatccgggcacgtctctccaggccg
aggcctgcggtggaaaagccggggttccatttgtgctgagtcggggcggccgaatggagccaggcctcgggacgcgggac
ggacgggctctggccgcgcaccttcgcgggctctgcagcgcccgaccgcctcccccggcagggaggaggcgcttgtgggg
ggcacccacggggcacagtgatccctgggggtctgcggacctcctgggccccgcagcagacacgagtttagcctttgggt
ttagtttaaatcacataagggtgtcgtgcaatcgatttatggtttctacacaccagacactttaacctccaacccccccc
atccaagccaacaagaaaatgcggtgccgtgttggcagctgagctgcgcccgaagagacgcagggagacgtaagagagga
aagtgtgagtggccggggggcctccccccgtcagaagtcgcgcagtcgcgcccataaaacgccccctccgggcggctagg
gcaggtgagcgcgtccccgggcctccccacgccggcccctgccacagagccgtctaggtcgagcagatatttacagaata
aaaatgacaataactcgacgtcccgggacggccacgcaatctgttagtaatttagcgggatgggaatttcctttctaggg
cctgccagtgaagcgcttttccaaatttccacagcgggggaagcctgcgattttacataatgacttcagcatgccgggct
ttctcgacacccctccccggcccccggcccccgccccccgccccttttccagcagggccgggctccctccggacacccgc
gtggactcaggcgtcccgtctggcccgttcgcccccgtttcccccgccagccccagcgcccccctgcccggcccccggat
tccccgttcccgcccctacgcccccatcccctccccgtgcgcccctccccgtgcgcccccctccccgtgcgccccccctc
cccgtgcgcccccctccccgtgcgccccccctccccgggcgcccccctccccgggcgccccccctccccgtgcgcccccc
cctccccgtgcgccccccctccccgtgcgcgccccgcctcttgcgcccctgcccccaggcgagcggctgccgcggcgcgg
ggaggggcgggcgctcggcgactcgtccccggggccccgcgcgggcccgggcagcaggggcgtgatgtcacggcagggag
ggggcgcgggagccgccgggccggcggggaggcgggggaggtgttttccagctttaaaaaggcaggaggcagagcgcggc
cctgcgtcagagcgagactcagaggctccgaactcgccggcggagtcgccgcgccagatcccagcagcagggcgcgg
NFATc1 Promoter fragment (P2)
(DNA)
(SEQ ID NO: 782)
aggcaggaggaagaggaaaggggcgcagggcgctcggggagcagagccgggggcccgcggtggccgcagaggccgggccgg
ggcgcagaggccgggcgagctggccgcgctctgggccgccgcctccggaactccctgcgcctggcgcgcggccaccgtgg
tcccggcaacggcattaaacagagggaaacagacccgggattccgtcacccgggcggggggataaggacggctttgagag
cagacaggaaaagggagcttttctgcatggggtgaaaaaattatttattgaaggaggaggaggcggcagcggaggaaggg
gaggggcgggaggaggaggaagagccggccgcccccgccccggccccggctcctcaggagccaagggcagcctcgccagg
tcggtcccgggctcgaggaccgcggctggggtcgaggggctcagtctcccacgtgaccggctgggcgcgccccgccagac
ccggcctcgggattccctcctcccggcgagtctccgcccgccccgtcctggaggtggggagaaggagggcggggcggggg
ggacggaaactctccccgccaaatcctggccccaggcctggggacactcgcggcgggaagatttggaggggaggggaggg
ggaggggcgtgggggcgcggcctcgctggagtccccctgaccccccgacccccgcccaccggcctgggcgtcctcccgcg
gcccctcctcccctcccggcgcccggtgctctggggcgcgtgccacgcctggctcggcgccgtaggggcccccgcaggta
gagacccctggaaatggcctcgacgccgcaggagcgaggcggccaccaccccgctaatccgggcacgtctctccaggccg
aggcctgcggtggaaaagccggggttccatttgtgctgagtcggggcggccgaatggagccaggcctcgggacgcgggac
ggacgggctctggccgcgcaccttcgcgggctctgcagcgcccgaccgcctcccccggcagggaggaggcgcttgtgggg
ggcacccacggggcacagtgatccctgggggtctgcggacctcctgggccccgcagcagacacgagtttagcctttgggt
ttagtttaaatcacataagggtgtcgtgcaatcgatttatggtttctacacaccagacactttaacctccaacccccccc
atccaagccaacaagaaaatgcggtgccgtgttggcagctgagctgcgcccgaagagacgcagggagacgtaagagagga
aagtgtgagtggccggggggcctccccccgtcagaagtcgcgcagtcgcgcccataaaacgccccctccgggcggctagg
gcaggtgagcgcgtccccgggcctccccacgccggcccctgccacagagccgtctaggtcgagcagatatttacagaata
aaaatgacaataactcgacgtcccgggacggccacgcaatctgttagtaatttagcgggatgggaatttcctttctaggg
cctgccagtgaagcgcttttccaaatttccacagcgggggaagcctgcgattttacataatgacttcagcatgccgggct
ttctcgacacccctccccggcccccggcccccgccccccgccccttttccagcagggccgggctccctccggacacccgc
gtggactcaggcgtcccgtctggcccgttcgcccccgtttcccccgccagccccagcgcccccctgcccggcccccggat
tccccgttcccgcccctacgcccccatcccctccccgtgcgcccctccccgtgcgcccccctccccgtgcgccccccctc
cccgtgcgcccccctccccgtgcgccccccctccccgggcgcccccctccccgggcgccccccctccccgtgcgcccccc
cctccccgtgcgccccccctccccgtgcgcgccccgcctcttgcgcccctgcccccaggcgagcggctgccgcggcgcgg
ggaggggcgggcgctcggcgactcgtccccggggccccgcgcgggcccgggcagcaggggcgtgatgtcacggcagggag
ggggcgcgggagccgccgggccggcggggaggcgggggaggtgttttccagctttaaaaaggcaggaggcagagcgcggc
cctgcgtcagagcgagactcagagg
NFATc1 Promoter fragment (P3)
(DNA)
(SEQ ID NO: 783)
caggcctggggacactcgcggcgggaagatttggaggggaggggagggggaggggcgtgggggcgcggcctcgctggagt
ccccctgaccccccgacccccgcccaccggcctgggcgtcctcccgcggcccctcctcccctcccggcgcccggtgctct
ggggcgcgtgccacgcctggctcggcgccgtaggggcccccgcaggtagagacccctggaaatggcctcgacgccgcagg
agcgaggcggccaccaccccgctaatccgggcacgtctctccaggccgaggcctgcggtggaaaagccggggttccattt
gtgctgagtcggggcggccgaatggagccaggcctcgggacgcgggacggacgggctctggccgcgcaccttcgcgggct
ctgcagcgcccgaccgcctcccccggcagggaggaggcgcttgtggggggcacccacggggcacagtgatccctgggggt
ctgcggacctcctgggccccgcagcagacacgagtttagcctttgggtttagtttaaatcacataagggtgtcgtgcaat
cgatttatggtttctacacaccagacactttaacctccaaccccccccatccaaagccaacaagaaaatgcggtgccgtg
ttggcagctgagctgcgcccgaagagacgcagggagacgtaagagaggaaagtgtgagtggccggggggcctccccccgt
cagaagtcgcgcagtcgcgcccataaaacgccccctccgggcggctagggcaggtgagcgcgtccccgggcctccccacg
ccggcccctgccacaggccgtctaggtcgagcagatatttacagaataaaaatgacaataactcgacgtcccgggacggc
cacgcaatctgttagtaatttagcgggatgggaatttcctttctagggcctgccagtgaagcgcttttccaaatttccac
agcgggggaagcctgcgattttacataatgacttcagcatgccgggctttctcgacacccctccccggcccccggccccc
gccccccgccccttttccagcagggccgggctccctccggacacccgcgtggactcaggcgtcccgtctggcccgttcgc
ccccgtttcccccgccagccccagcgcccccctgcccggcccccggattccccgttcccgcccctacgcccccatcccct
ccccgtgcgcccctccccgtgcgcccccctccccgtgcgccccccctccccgtgcgcccccctccccgtgcgccccccct
ccccgggcgcccccctccccgggcgccccccctccccgtgcgcccccccctccccgtgcgccccccctccccgtgcgcgc
cccgcctcttgcgcccctgcccccaggcgagcggctgccgcggcgcggggaggggcgggcgctcggcgactcgtccccgg
ggccccgcgcgggcccgggcagcaggggcgtgatgtcacggcagggagggggcgcgggagccgccgggccggcggggagg
cgggggaggtgttttccagctttaaaaaggcaggaggcagagcgcggccctgcgtcagagcgagactcagaggctccgaa
ctcgccggcggagtcgccgcgccagatcccagcagcagggcgcgg
pNFAT-MMP9cat-1 gBLOCK sequence
(DNA)
(SEQ ID NO: 784)
aagaggaaaatttgtttcatacagaaggcgttactagttaggcgtgtacggtgggaggcctatataagcagagctcgttta
gtgaaccgtcagatcgcctggagacgccatccacgctgttttgacctccatagaagacaccgggaccgatccagcctctcg
acattcgtttctagagccaccatgagcctctggcagcccctggtcctggtgctcctggtgctgggctgctgctttgctttc
caaacctttgagggcgacctcaagtggcaccaccacaacatcacctattggatccaaaactactcggaagacttgccgcgg
gcggtgattgacgacgcctttgcccgcgccttcgcactgtggagcgcggtgacgccgctcaccttcactcgcgtgtacagc
cgggacgcagacatcgtcatccagtttggtgtcgcggagcacggagacgggtatcccttcgacgggaaggacgggctcctg
gcacacgcctttcctcctggccccggcattcagggagacgcccatttcgacgatgacgagttgtggtccctgggcaagggc
gtcgtggttccaactcggtttggaaacgcagatggcgcggcctgccacttccccttcatcttcgagggccgctcctactct
gcctgcaccaccgacggtcgctccgacggcttgccctggtgcagtaccacggccaactacgacaccgacgaccggtttggc
ttctgccccagcgagagactctacacccaggacggcaatgctgatgggaaaccctgccagtttccattcatcttccaaggc
caatcctactccgcctgcaccacggacggtcgctccgacggctaccgctggtgcgccaccaccgccaactacgaccgggac
aagctcttcggcttctgcccgacccgagctgactcg
pNFAT-MMP9cat-2 gBLOCK sequence:
(DNA)
(SEQ ID NO: 785)
ttcggcttctgcccgacccgagctgactcgacggtgatggggggcaactcggcgggggagctgtgcgtcttccccttcact
ttcctgggtaaggagtactcgacctgtaccagcgagggccgcggagatgggcgcctctggtgcgctaccacctcgaacttt
gacagcgacaagaagtggggcttctgcccggaccaaggatacagtttgttcctcgtggcggcgcatgagttcggccacgcg
ctgggcttagatcattcctcagtgccggaggcgctcatgtaccctatgtaccgcttcactgaggggccccccttgcataag
gacgacgtgaatggcatccggcacctctatggtcctcgccctgaacctgattacaaggatgacgacgataagtgataagct
agctcgactcgacaatcaacctctggattacaaaatttgtgaaagattgactggtattcttaactatgttgctccttttac
gctatgtggatacgctgctttaatgcctttgtatcatgctattgcttcccgtatggctttcattttctcctccttgtataa
atcctggttgctgtctctttatgaggagttgtggcccgttgtcaggcaacgtggcgtggtgtgcactgtgtttgctgacgc
aacccccactggttggggcattgccaccacctgtcagctcctttccgggactttcgctttccccctccctattgccacggc
ggaactcatcgccgcctgccttgcccgctgctggacaggggctcggctgttgggcactgacaattccgtggtgttgtcggg
gaaatcatcgtcctttccttggctgctcgcctgtgttgccacctggattctgcgcgggacgtccttctgctacgtcccttc
ggccctcaatccagcggaccttccttcccgcggcctgctgccggctctgcggcctcttccgcatcttcgccttcgccctca
gacgagtcggatctccctttgggccgcctccccgcctggaattaattcgagctcggtacctttaagaccaatgacttacaa
ggcagctgtag
Primer
(DNA)
(SEQ ID NO: 786)
tagatggtaccaagaggaaaatttgtttcatacag
Primer
(DNA)
(SEQ ID NO: 787)
tagataagcttgctggatcggtcccggtgtc
Primer
(DNA)
(SEQ ID NO: 788)
tcatacagaaggcgttactagttaggcgtgtacggtgg
Primer
(DNA)
(SEQ ID NO: 789)
acagtaccggattgccaagcttttatcacttatcgtcgtcatccttg
Primer
(DNA)
(SEQ ID NO: 790)
aagttggtaccgttccaaacctttgagggcgacc
Primer
(DNA)
(SEQ ID NO: 791)
aagttctcgagcaggttcagggcgaggaccatag
Primer
(DNA)
(SEQ ID NO: 792)
attgactcgagctctcgacattcgtttctagagc
Primer
(DNA)
(SEQ ID NO: 793)
attgaaagcttttatcacttatcgtcgtcatccttg
Primer
(DNA)
(SEQ ID NO: 794)
tagcaaaataggctgtccc
Primer
(DNA)
(SEQ ID NO: 795)
attgactcgaggctggatcggtcccggtgtc
Primer
(DNA)
(SEQ ID NO: 796)
aagacaccgggaccgatccagcctcgagagacccaagctggctagccacc
Primer
(DNA)
(SEQ ID NO: 797)
ttaccaacagtaccggattgccaagcttttatcacttatcgtcgtcatcc
Primer
(DNA)
(SEQ ID NO: 798)
attgaaagcttctctcgacattcgtttctagagc
Primer
(DNA)
(SEQ ID NO: 799)
attgagagctcttatcacttatcgtcgtcatc
NFAT modif 1 gBLOCK sequence:
(DNA)
(SEQ ID NO: 800)
attctgtggataaccgtattaccgctagcatggatctcggggacgtctaactactaagcgagagtagggaactgccaggc
atcaaataaaacgaaaggctcagtcggaagactgggcctttcgttttatctgttgtttgtcggtgaacgctctcctgagt
aggacaaatccgccgggagcggatttgaacgttgtgaagcaacggcccggagggtggcgggcaggacgcccgccataaac
tgccaggcatcaaactaagcagaaggccatcctgacggatggcctttttgcgtttctacaaactcttcctgttagttagt
tacttaagctcgggccccaaattatgattttgttctgactgatagtgacctgttcgttgcaacaaattgataagcaatgc
ttttttataatgccaactttgtacaaaaaagcaggcttcgctgtgccttctagttgccagccatctgttgtttgcccctc
ccccgtgccttccttgaccctggaaggtgccactcccactgtcctttcctaataaaatgaggaaattgcatcgcattgtc
tgagtaggtgtcattctattctggggggtggggtggggcaggacagcaagggggaggattgggaagacaatagcaggcat
gctggggatgcggtgggctctatggttcgaaggagatagaaccagatcttgactagtggtaccgaattccaggcctgggg
acactcgcggcgggaa
NFAT modif 2 gBLOCK sequences:
(DNA)
(SEQ ID NO: 801)
acaaggatgacgacgataagtgataagagctcgctagcgatatcgccaccatgggggtaaaagttcttttcgcgcttatct
gtatcgcggttgcagaagctaaaccaacagaaaataatgaagactttaacattgttgccgtggcatcgaacttcgccacaa
ccgatttggacgctgatcgcgggaaactgcccggcagccaccacggctcgcaaagctcggtttgcccggacttgcaccgtt
gtgggcgcgggcaagcgcatcgtgagcagcgtcgcttgcagcaccgtgggcgcggccagcaattacgcgaccacggaagcc
gttgttaaccacgcgaagtagcacgtcaagaagctgccgctggaggtgctcaaagagctggaagccaatgcccggaaagct
ggctgcaccaggggctgtctgatctgcctgtcccacatcaagtgcacgcccaagatgaagaagttcatcccaggacgctgc
cacacctacgaaggcgacaaagagtccgcacagggcggcataggcgaggcgatcgtcgacattcctgagattcctgggttc
aaggacttggagcccctggagcagttcatcgcacaggtcgatctgtgtgtggactgcacaactggctgcctcaaagggctt
gccaacgtgcagtgttctgacctgctcaagaagtggctgccgcaacgctgtgcgacctttgccagcaagatccagggccag
gtggacaagatcaagggggccggtggtgactaagcggccgctcgagcatgcatctagaaataattcttactgt
Primer
(DNA)
(SEQ ID NO: 802)
acaaaattcaaaattttatcgatactagttggcctaactggccggtaccaag
Primer
(DNA)
(SEQ ID NO: 803)
atccgatttaaattcgaattcgctagcttatcacttatcgtcgtcatcc
NFAT consensus sequence:
(SEQ ID NO: 804)
(A/T)GGAAA(A/N)(A/T/C)N
Current NFAT RE (Form System Biosciences. The sequence is from the mouse IL2
promoter
(DNA)
(SEQ ID NO: 805)
aagaggaaaatttgtttcatacagaaggcgtt
Mouse IL2 Promoter (highlighted in green the NFAT RE used, highlighted in
yellow is the start codon)
(DNA)
(SEQ ID NO: 806)
aactagagacatataaaataacaccaacatccttagatacaacccttcctgagaatttattggacatcatactcttttta
aaaagcataataaacatcaagacacttacacaaaatatgttaaattaaatttaaaacaacaacgacaaaatagtacctca
agctcaacaagcattttaggtgtccttagcttactatttctctggctaactgtatgaagccatctatcaccctgtgtgca
attagctcattgtgtagataagaaggtaaaaccatcttgaaacaggaaaccaatatccttcctgtctaatcaacaaatct
aaaagatttattcttttcatctatctcctcttgcgtttgtccaccacaacaggctgcttacaggttcaggatggttttga
caaagagaacattttcatgagttacttttgtgtctccaccccaaagaggaaaatttgtttcatacagaaggcgttcattg
tatgaattaaaactgccacctaagtgtgggctaacccgaccaagagggatttcacctaaatccattcagtcagtgtatgg
gggtttaaagaaattccagagagtcatcagaagaggaaaaacaaaaggtaatgctttctgccacacaggtagactctttg
aaaatatgtgtaatatgtaaaacatcgtgacacccccatattatttttccagcattaacagtataaattgcctcccatgc
tgaagagctgcctatcacccttgctaatcactcctcacagtgacctcaagtcctgcaggcatgtacagcatgcagctcgc
atcctgtgtcac
NFAT RE (Form PRomega. The sequence is from the humane IL2 promoter
(DNA)
(SEQ ID NO: 807)
ggaggaaaaactgtttcatacagaaggcgt
Possible NFAT RE from ET-1 promoter
(DNA)
(SEQ ID NO: 808)
tccagggaaaatcggagtagaacaagagggatg
Possible NFAT RE from ET-1 promoter
(DNA)
(SEQ ID NO: 809)
actgttggaaaacgtaaacacgttattaaacggt
Possible NFAT RE from human CD3γ
(DNA)
(SEQ ID NO: 810)
tccttaacggaaaaacaaaa
Possible NFAT RE from human CD3γ
(DNA)
(SEQ ID NO: 811)
aaaggaaaaagtatatgttc
Possible NFAT RE from human IL3 promoter
(DNA)
(SEQ ID NO: 812)
atgccatggaaagggtg
Possible NFAT RE from human GPC6
(DNA)
(SEQ ID NO: 813)
aaggggaaatgttgagtctaga
Possible NFAT RE from human growth hormone-releasing hormone
(DNA)
(SEQ ID NO: 814)
AACTTGGAAAAGCATAG
NFATc1 promoter large
(DNA)
(SEQ ID NO: 815)
ttatgccgtctagaggagacatactttctactcaaagctacacacatagactacaacgatgggaaaagacgacacaccaa
cagcgacttcaggaaagctggagtggctgctaatgttagacaaaataggctttttaaaaaaggttttattaaagaggaat
gtttcgtaatgataaaagcactaatctgtgagaaagatacaacaatgataaacatacgtgcagctaataagagagctcca
aaatctatgaagcaaaaactcacagaatgaggggagaagcagttctacaacagagaatggggacttcgatactccacttt
caataatggatacaacaaccaggcagataacaaggcaacagaaggcctgaacaacagtataaaccaattagacctaccag
atatctatagctagcacactccacccaacgacagcagaatacacattcttctcaagcgcacaagtaacatcctccaggat
gggccatgttctaggccatcaaacaaactcaggtggtttgaggccagaggcctctcttttaaccaccacactagggcctt
cggaggaggcaagcagagagttgtcaaagaggccctcaggactgggtgcagtggctcatgactgtaatcccagcacttta
gaaggctgaggcacaaggatcttttgagctcaggagttcaagaaatgagcacttatccactgggcgcggtggctcacgcc
agtaatccagcactttgggaggcttaggcgggcggatcaagaggtcagaagctcaagaccagcctgaccaacatggtgaa
accccgtctctactaaaagtacaaaaattagccgggcgtggtggcgcacacctgtaatcccagctacttgggaggctgag
gcaggagaatcacttgaacccgggaggtggaggttgcagtgagtggagatcacaccattgcaccccagcctgggcaacag
agcgagactccgtctcaaaaaaaaaaaaaaaaaaaaagaaagaaagaaaaagaaaaaaaaagtgagcatgtattttgcca
gagtctggagattagaattaaattagcaaaccagaattatagaaaaagctatttacttttaagtaaacagctgagatttt
tttttttaagtcagtgtgaatgaagctcacagccatggttggagctgagaaagaaggatttccctttagttatgcacctg
tgtcagcaccttctgactttccttctaaagtctggggtgttcctgaggatccgtaagtttggggttcagggtttctacag
catgctgttacttgtgaaacatctctttaaccatgtcccagagttgcccaggagtttaagaccagcctgagcaacatagc
aagacctcatctcaacaacaacaaaaattagaaataaattagccaggtgtggtgacatgtgcctgtagtcccagctactc
agaaggctgaggcatgaggatcacttgggcccaggaagttggggctgcagggagccctgttcatgccgctgcactccagc
ctgcaagacagagcagaaaaaaagaatcaggatcctgggcagagggaggagaggggaccggggtccagcaagcacttggg
gattgactgaatggcgttggggagagatgactccaaagtcctggagtgggtgagaatgactgcgagtggcttttaggtgg
ggaggttcctgcctggccactccgggaggggacgtggggctgaagggtatcaggtgccgtgctgagcagtttggccttga
tcctaatgccctggacacacgtctagggtaggaaagttgactgatccattggtgatctgagtttttagacatggtggtag
tccatgaggtgggtgttcatgctaagagtttagacagggaaacctatgaagcccttagcaaccctccagggaaggggcgt
ggttaaagagatgtttcataagtaacagcatggtatagaaactctgaaccccaaatgtatgggtcctcaggaacacccca
gactttagaaggaaagtcagaaggtgctgacacgggtgtataactaaagggaaatccttctttctcagctccaaccatgg
ctgtgaggttcattcacactgacttaaaaaaaaaaatctcagtttacttaaaagtaaatagctttttctataattctggt
ttgctaatttaatcctagtctccagaccctggctaaataaatgcccatttctccagatggtctcaagagtctctggacat
cgtgggggcccttccctgttggttggaaggtgcctcaggaagaagggggtggattctgagttgagtcaaaacctcaaaga
cccctgatgggaaaagctctcaagtgaccaccgctgtgggccagaatgcaaaactgcaggaacagaacattcgcaggaac
agaacacagtcgtattaagtgattttcccgagcaggaagtggcatctggcctgcggttcagtagggggaggaaagggtgg
gcgcacctgcccctggctggcgcacctgccaggtagccccacgcggcaccgcgtgtgccgagcgcccctgaggatggaaa
gccccacgcggggcaggtggcacccaccctccgaagacgggacgggatggagcgttgagcttcggggcagctccggcccg
gcccgcgctggagacgcccgcatctgccaggatggcgtctcatagccctggtgctcacacatgacgccaggaagccccag
caacagtgaccgcccaggctctagaaaatattggacggggtggatgaacacccaagtgcgctccaggagaagggatttgg
caccccaaggggcttttaaaacggtaagcttctaggggtgtctttgcccccaataatccatagaaacaacagtcatctaa
aaatagtcttgttttctgtcctaagctccttttaactttgttagtcatcaccaatcctaaaataaaacccgtgtaacgtc
tcccctagtagcggctataaacaaacctacgaggaggcaggaggaagaggaaaggggcgcagggcgctcggggagcagag
ccgggggcccgcggtggccgcagaggccgggccggggcgcagaggccgggcgagctggccgcgctctgggccgccgcctc
cggaactccctgcgcctggcgcgcggccaccgtggtcccggcaacggcattaaacagagggaaacagacccgggattccg
tcacccgggcggggggataaggacggctttgagagcagacaggaaaagggagcttttctgcatggggtgaaaaaattatt
tattgaaggaggaggaggcggcagcggaggaaggggaggggcgggaggaggaggaagagccggccgcccccgccccggcc
ccggctcctcaggagccaagggcagcctcgccaggtcggtcccgggctcgaggaccgcggctggggtcgaggggctcagt
ctcccacgtgaccggctgggcgcgccccgccagacccggcctcgggattccctcctcccggcgagtctccgcccgccccg
tcctggaggtggggagaaggagggcggggcgggggggacggaaactctccccgccaaatcctggccccaggcctggggac
actcgcggcgggaagatttggaggggaggggagggggaggggcgtgggggcgcggcctcgctggagtccccctgaccccc
cgacccccgcccaccggcctgggcgtcctcccgcggcccctcctcccctcccggcgcccggtgctctggggcgcgtgcca
cgcctggctcggcgccgtaggggcccccgcaggtagagacccctggaaatggcctcgacgccgcaggagcgaggcggcca
ccaccccgctaatccgggcacgtctctccaggccgaggcctgcggtggaaaagccggggttccatttgtgctgagtcggg
gcggccgaatggagccaggcctcgggacgcgggacggacgggctctggccgcgcaccttcgcgggctctgcagcgcccga
ccgcctcccccggcagggaggaggcgcttgtggggggcacccacggggcacagtgatccctgggggtctgcggacctcct
gggccccgcagcagacacgagtttagcctttgggtttagtttaaatcacataagggtgtcgtgcaatcgatttatggttt
ctacacaccagacactttaacctccaaccccccccatccaaagccaacaagaaaatgcggtgccgtgttggcagctgagc
tgcgcccgaagagacgcagggagacgtaagagaggaaagtgtgagtggccggggggcctccccccgtcagaagtcgcgca
gtcgcgcccataaaacgccccctccgggcggctagggcaggtgagcgcgtccccgggcctccccacgccggcccctgcca
caggccgtctaggtcgagcagatatttacagaataaaaatgacaataactcgacgtcccgggacggccacgcaatctgtt
agtaatttagcgggatgggaatttcctttctagggcctgccagtgaagcgcttttccaaatttccacagcgggggaagcc
tgcgattttacataatgacttcagcatgccgggctttctcgacacccctccccggcccccggcccccgccccccgcccct
tttccagcagggccgggctccctccggacacccgcgtggactcaggcgtcccgtctggcccgttcgcccccgtttccccc
gccagccccagcgcccccctgcccggcccccggattccccgttcccgcccctacgcccccatcccctccccgtgcgcccc
tccccgtgcgcccccctccccgtgcgccccccctccccgtgcgcccccctccccgtgcgccccccctccccgggcgcccc
cctccccgggcgccccccctccccgtgcgcccccccctccccgtgcgccccccctccccgtgcgcgccccgcctcttgcg
cccctgcccccaggcgagcggctgccgcggcgcggggaggggcgggcgctcggcgactcgtccccggggccccgcgcggg
cccgggcagcaggggcgtgatgtcacggcagggagggggcgcgggagccgccgggccggcggggaggcgggggaggtgtt
ttccagctttaaaaaggcaggaggcagagcgcggccctgcgtcagagcgagactcagaggctccgaactcgccggcggag
tcgccgcgccagatcccagcagcagggcgcgggcaccggggcgcgggcagggctcggagccaccgcgcaggtcctagggc
cgcggccgggccccgccacgcgcgcacacgcccctcgatg
NFATc3 promoter sequence
(DNA)
(SEQ ID NO: 816)
gcagccaggcagggtgggcgcgcgtagggggcggggccgggcgcgcggcagggcgcgagagcgcacccgcggcggcggtg
gcggcgactgtgggggggcggcggggaacattggctaagccgacagtggaggcttaggcaccggtggcgggcggctgcgg
ttcctggtgctgctcggcgcgcggccagctttcggaacggaacgctcggcgtcgcgggccccgcccggaaagtttgccgt
ggagtcgcgacctcttggcccgcgcggcccggcatgaagcggcgttgaggagctgctgccgccgcttgccgctgccgccg
ccgccgcctgaggaggagctgcagcaccctgggccacgccg
NFATc2 promoter sequence 1
(DNA)
(SEQ ID NO: 817)
cagagagaggctgcgttcagactggggcactgccatcccctccgcatca
tggggtctgtggaccaaggtaactgactctcgatcccttccagccttttccgctcgctcctcccggccctttcctgctgc
tcccgtcccgggcagcactttcagctcccggcagaggtcggtgcgggaggcctggggaccccgctcgccctcggcgcaca
ggtagcggggcccgcggaggggcgcccgcgccccggccagggaagggacacttgggaaggcgactttggacaactttacg
cgggggcagggaagtgtcccaggccgggattccctaggccagtctgtcgggaggattttcctctccacgggacaccggga
gggattctcgctactaaccgctggctgtttaaccgtttcagcactcggcttttgacagcaa
NFATc2 promoter sequence 2
(DNA)
(SEQ ID NO: 818)
catcatggggtctgtggaccaaggtaactgactctcgatcccttccagccttttccgctcgctc
NFATc1 response element consensus
(DNA)
(SEQ ID NO: 819)
cattttttccat
NFATc1 response element consensus
(DNA)
(SEQ ID NO: 820)
tttttcca
NFAT response elements contained within the Foxp3 enhancer region
(DNA)
(SEQ ID NO: 821)
acttgaaaatgagataaatgttcacctatgttggcttctagtctcttttatggcttcatt
ttttccatttactatagaggttaagagtgtgggtactggagccagactgtctgggacaa
muE6 IgD/CD8/41BB/CD3z
(DNA)
(SEQ ID NO: 822)
atggccctgcccgtgaccgctttgctgctccccctggcgctgctgctgcacgccgccaggccagaggtgaaggtggtggag
tctgggggagacttagtgaagcctggagggtccctgaaactctcctgtgtagtctctggattcactttcagtagatatggc
atgtcttgggttcgccagactccaggcaagaggctggagtgggtcgcaaccattagtggtggcggtacttacatctactat
ccagacagtgtgaaggggcgattcaccatctccagagacaatgccaagaacaccctgtacctgcaaatgagcagtctgaag
tctgaggacacagccatgtatcactgtacaagggataactacggtaggaactacgactacggtatggactactggggtcaa
ggaacctcagtcaccgtctcctcaggcggtggcggatccggcggtggcggatccggcggtggcggatcccaaattgttctc
acccagtctccagcaatcatgtctgcatctccaggggaggaggtcaccctaacctgcagtgccacctcaagtgtaagttac
atacactggttccagcagaggccaggcacttctcccaaactctggatttatagcacatccaacctggcttctggagtccct
gttcgcttcagtggcagtggatatgggacctcttactctctcacaatcagccgaatggaggctgaagatgctgccacttat
tactgccagcaaaggagtagttccccattcacgttcggctcggggacaaagttggaaataaaagagtctccaaaggcaca
ggcctcctcagtgcccactgcacaaccccaagcagagggcagcctcgccaaggcaaccacagccccagccaccacccgta
acacaggaagaggcggcgaagagaagaaaaaggagaaggagaaagaggaacaagaagagagagagacaaagacaccaatc
tacatttgggccccgctcgcaggcacatgtggagtgctcctcctctccctggtgattaccctgtactgcaaaaggggccgc
aaaaaactcctttacatttttaagcagccttttatgaggccagtacagacgactcaagaggaagacgggtgctcatgccgc
tttcctgaggaggaggaaggagggtgcgaactgcgcgttaagttctcccgatcagccgacgcgcctgcttacaagcagggc
cagaaccaactgtacaacgagctgaatctcggtagacgggaagagtacgacgtgttggacaaacggagaggccgcgaccca
gaaatgggcggcaagcctcgcaggaaaaacccccaggagggactgtacaatgagttgcagaaagataagatggcagaagct
tatagcgagatcggaatgaagggggaaaggagacgagggaaaggacacgacggcctttatcagggcctgtccacagcaaca
aaagatacgtatgacgccctccatatgcaggcacttccaccacggtgataa
(amino acids)
(SEQ ID NO: 823)
MALPVTALLLPLALLLHAARPEVKVVESGGDLVKPGGSLKLSCVVSGFTFSRYGMSWVRQTPGKRLEWVATISGGGTYIY
YPDSVKGRFTISRDNAKNTLYLQMSSLKSEDTAMYHCTRDNYGRNYDYGMDYWGQGTSVTVSSGGGGSGGGGSGGGGSQI
VLTQSPAIMSASPGEEVTLTCSATSSVSYIHWFQQRPGTSPKLWIYSTSNLASGVPVRFSGSGYGTSYSLTISRMEAEDA
ATYYCQQRSSSPFTFGSGTKLEIKESPKAQASSVPTAQPQAEGSLAKATTAPATTRNTGRGGEEKKKEKEKEEQEERETK
TPIYIWAPLAGTCGVLLLSLVITLYCKRGRKKLLYIFKQPFMRPVQTTQEEDGCSCRFPEEEEGGCELRVKFSRSADAPA
YKQGQNQLYNELNLGRREEYDVLDKRRGRDPEMGGKPRRKNPQEGLYNELQKDKMAEAYSEIGMKGERRRGKGHDGLYQG
LSTATKDTYDALHMQALPPR**
muC2 IgD/CD8/41BB/CD3z
(DNA)
(SEQ ID NO: 824)
atggccctgcccgtgaccgctttgctgctccccctggcgctgctgctgcacgccgccaggccagaggtccagctggaggag
tcagggggaggcttagtgaagcctggagggtccctgaaactctcctgtgcagcctctggattcactttcagtggctatgcc
atgtcttgggttcgccagactccggagaagaggctggagtgggtcgcaaccattagtagtggtggtacttatatctactat
ccagacagtgtgaaggggcgattcaccatctccagagacaatgccaagaacaccctgtacctgcaaatgagcagtctgagg
tctgaggacacggccatgtattactgtgcaagacttgggggggataattactacgaatacttcgatgtctggggcgcaggg
accacggtcaccgtctcctccggcggtggcggatccggcggtggcggatccggcggtggcggatccgacattgtgatcaca
cagtctacagcttccttaggtgtatctctggggcagagggccaccatctcatgcagggccagcaaaagtgtcagtacatct
ggctatagttatatgcactggtaccaacagagaccaggacagccacccaaactcctcatctatcttgcatccaacctagaa
tctggggtccctgccaggttcagtggcagtgggtctgggacagacttcaccctcaacatccatcctgtggaggaggaggat
gctgcaacctattactgtcagcacagtagggagcttccgttcacgttcggaggggggaccaagctggagataaaagagtc
tccaaaggcacaggcctcctcagtgcccactgcacaaccccaagcagagggcagcctcgccaaggcaaccacagccccag
ccaccacccgtaacacaggaagaggcggcgaagagaagaaaaaggagaaggagaaagaggaacaagaagagagagagaca
aagacaccaatctacatttgggccccgctcgcaggcacatgtggagtgctcctcctctccctggtgattaccctgtactg
caaaaggggccgcaaaaaactcctttacatttttaagcagccttttatgaggccagtacagacgactcaagaggaagacgg
gtgctcatgccgctttcctgaggaggaggaaggagggtgcgaactgcgcgttaagttctcccgatcagccgacgcgcctgc
ttacaagcagggccagaaccaactgtacaacgagctgaatctcggtagacgggaagagtacgacgtgttggacaaacggag
aggccgcgacccagaaatgggcggcaagcctcgcaggaaaaacccccaggagggactgtacaatgagttgcagaaagataa
gatggcagaagcttatagcgagatcggaatgaagggggaaaggagacgagggaaaggacacgacggcctttatcagggcct
gtccacagcaacaaaagatacgtatgacgccctccatatgcaggcacttccaccacggtgataa
(amino acids)
(SEQ ID NO: 825)
MALPVTALLLPLALLLHAARPEVQLEESGGGLVKPGGSLKLSCAASGFTFSGYAMSWVRQTPEKRLEWVATISSGGTYIY
YPDSVKGRFTISRDNAKNTLYLQMSSLRSEDTAMYYCARLGGDNYYEYFDVWGAGTTVTVSSGGGGSGGGGSGGGGSDIV
ITQSTASLGVSLGQRATISCRASKSVSTSGYSYMHWYQQRPGQPPKLLIYLASNLESGVPARFSGSGSGTDFTLNIHPVE
EEDAATYYCQHSRELPFTFGGGTKLEIKESPKAQASSVPTAQPQAEGSLAKATTAPATTRNTGRGGEEKKKEKEKEEQEE
RETKTPIYIWAPLAGTCGVLLLSLVITLYCKRGRKKLLYIFKQPFMRPVQTTQEEDGCSCRFPEEEEGGCELRVKFSRSA
DAPAYKQGQNQLYNELNLGRREEYDVLDKRRGRDPEMGGKPRRKNPQEGLYNELQKDKMAEAYSEIGMKGERRRGKGHDG
LYQGLSTATKDTYDALHMQALPPR**
muE6 CD28/CD28/CD28/CD3z
(DNA)
(SEQ ID NO: 826)
atggccctgcccgtgaccgctttgctgctccccctggcgctgctgctgcacgccgccaggccagaggtgaaggtggtgga
gtctgggggagacttagtgaagcctggagggtccctgaaactctcctgtgtagtctctggattcactttcagtagatatg
gcatgtcttgggttcgccagactccaggcaagaggctggagtgggtcgcaaccattagtggtggcggtacttacatctac
tatccagacagtgtgaaggggcgattcaccatctccagagacaatgccaagaacaccctgtacctgcaaatgagcagtct
gaagtctgaggacacagccatgtatcactgtacaagggataactacggtaggaactacgactacggtatggactactggg
gtcaaggaacctcagtcaccgtctcctcaggcggtggcggatccggcggtggcggatccggcggtggcggatcccaaatt
gttctcacccagtctccagcaatcatgtctgcatctccaggggaggaggtcaccctaacctgcagtgccacctcaagtgt
aagttacatacactggttccagcagaggccaggcacttctcccaaactctggatttatagcacatccaacctggcttctg
gagtccctgttcgcttcagtggcagtggatatgggacctcttactctctcacaatcagccgaatggaggctgaagatgct
gccacttattactgccagcaaaggagtagttccccattcacgttcggctcggggacaaagttggaaataaaaaaacacct
ttgtccaagtcccctatttcccggaccttctaagcccttttgggtgctggtggtggttggtggagtcctggcttgctata
gcttgctagtaacagtggcctttattattttctgggtgagaagcaagcggtctcggctcctgcattctgattacatgaac
atgaccccaagaagaccaggccccaccaggaaacattaccagccctacgctccgccacgcgacttcgctgcctaccggtc
ccgcgttaagttctcccgatcagccgacgcgcctgcttacaagcagggccagaaccaactgtacaacgagctgaatctcg
gtagacgggaagagtacgacgtgttggacaaacggagaggccgcgacccagaaatgggcggcaagcctcgcaggaaaaac
ccccaggagggactgtacaatgagttgcagaaagataagatggcagaagcttatagcgagatcggaatgaagggggaaag
gagacgagggaaaggacacgacggcctttatcagggcctgtccacagcaacaaaagatacgtatgacgccctccatatgc
aggcacttccaccacggtgataa
(amino acids)
(SEQ ID NO: 827)
MALPVTALLLPLALLLHAARPEVKVVESGGDLVKPGGSLKLSCVVSGFTFSRYGMSWVRQTPGKRLEWVATISGGGTYIY
YPDSVKGRFTISRDNAKNTLYLQMSSLKSEDTAMYHCTRDNYGRNYDYGMDYWGQGTSVTVSSGGGGSGGGGSGGGGSQI
VLTQSPAIMSASPGEEVTLTCSATSSVSYIHWFQQRPGTSPKLWIYSTSNLASGVPVRFSGSGYGTSYSLTISRMEAEDA
ATYYCQQRSSSPFTFGSGTKLEIKKHLCPSPLFPGPSKPFWVLVVVGGVLACYSLLVTVAFIIFWVRSKRSRLLHSDYMN
MTPRRPGPTRKHYQPYAPPRDFAAYRSRVKFSRSADAPAYKQGQNQLYNELNLGRREEYDVLDKRRGRDPEMGGKPRRKN
PQEGLYNELQKDKMAEAYSEIGMKGERRRGKGHDGLYQGLSTATKDTYDALHMQALPPR**
muC2 CD28/CD28/CD28/CD3z
(DNA)
(SEQ ID NO: 828)
atggccctgcccgtgaccgctttgctgctccccctggcgctgctgctgcacgccgccaggccagaggtccagctggaggag
tcagggggaggcttagtgaagcctggagggtccctgaaactctcctgtgcagcctctggattcactttcagtggctatgcc
atgtcttgggttcgccagactccggagaagaggctggagtgggtcgcaaccattagtagtggtggtacttatatctactat
ccagacagtgtgaaggggcgattcaccatctccagagacaatgccaagaacaccctgtacctgcaaatgagcagtctgagg
tctgaggacacggccatgtattactgtgcaagacttgggggggataattactacgaatacttcgatgtctggggcgcaggg
accacggtcaccgtctcctccggcggtggcggatccggcggtggcggatccggcggtggcggatccgacattgtgatcaca
cagtctacagcttccttaggtgtatctctggggcagagggccaccatctcatgcagggccagcaaaagtgtcagtacatct
ggctatagttatatgcactggtaccaacagagaccaggacagccacccaaactcctcatctatcttgcatccaacctagaa
tctggggtccctgccaggttcagtggcagtgggtctgggacagacttcaccctcaacatccatcctgtggaggaggaggat
gctgcaacctattactgtcagcacagtagggagcttccgttcacgttcggaggggggaccaagctggagataaaaaaacac
ctttgtccaagtcccctatttcccggaccttctaagcccttttgggtgctggtggtggttggtggagtcctggcttgctat
agcttgctagtaacagtggcctttattattttctgggtgagaagcaagcggtctcggctcctgcattctgattacatgaac
atgaccccaagaagaccaggccccaccaggaaacattaccagccctacgctccgccacgcgacttcgctgcctaccggtcc
cgcgttaagttctcccgatcagccgacgcgcctgcttacaagcagggccagaaccaactgtacaacgagctgaatctcggt
agacgggaagagtacgacgtgttggacaaacggagaggccgcgacccagaaatgggcggcaagcctcgcaggaaaaacccc
caggagggactgtacaatgagttgcagaaagataagatggcagaagcttatagcgagatcggaatgaagggggaaaggaga
cgagggaaaggacacgacggcctttatcagggcctgtccacagcaacaaaagatacgtatgacgccctccatatgcaggca
cttccaccacggtgataa
(amino acids)
(SEQ ID NO: 829)
MALPVTALLLPLALLLHAARPEVQLEESGGGLVKPGGSLKLSCAASGFTFSGYAMSWVRQTPEKRLEWVATISSGGTYIY
YPDSVKGRFTISRDNAKNTLYLQMSSLRSEDTAMYYCARLGGDNYYEYFDVWGAGTTVTVSSGGGGSGGGGSGGGGSDIV
ITQSTASLGVSLGQRATISCRASKSVSTSGYSYMHWYQQRPGQPPKLLIYLASNLESGVPARFSGSGSGTDFTLNIHPVE
EEDAATYYCQHSRELPFTFGGGTKLEIKKHLCPSPLFPGPSKPFWVLVVVGGVLACYSLLVTVAFIIFWVRSKRSRLLHS
DYMNMTPRRPGPTRKHYQPYAPPRDFAAYRSRVKFSRSADAPAYKQGQNQLYNELNLGRREEYDVLDKRRGRDPEMGGKP
RRKNPQEGLYNELQKDKMAEAYSEIGMKGERRRGKGHDGLYQGLSTATKDTYDALHMQALPPR**
CD19 IgD/CD8/41BB/CD3z
(DNA)
(SEQ ID NO: 830)
atggccctgcccgtgaccgctttgctgctccccctggcgctgctgctgcacgccgccaggccagacatacagatgacgca
gacgaccagcagcctttccgcttccctgggcgaccgagtaaccattagttgtagagcatctcaggatatttctaagtatc
tgaattggtaccaacagaaacctgatggcactgtcaagctcttgatatatcacaccagtcgactccattcaggcgtccct
tccagattcagtgggagtggcagcgggactgattactccctcactatctctaacctggaacaggaagacatcgctacata
cttctgtcagcagggaaacactctcccctatacctttgggggaggaaccaagttggaaataacaggcggtggcggatccg
gcggtggcggatccggcggtggcggatccgaggtgaaactgcaggagtcaggacctggcctggtggcgccctcacagagc
ctgtccgtcacatgcactgtctcaggggtctcattacccgactatggtgtaagctggattcgccagcctccacgaaaggg
tctggagtggctgggagtaatatggggtagtgaaaccacatactataattcagctctcaaatccagactgaccatcatca
aggacaactccaagagccaagttttcttaaaaatgaacagtctgcaaactgatgacacagccatttactactgtgccaaa
cattattactacggtggtagctatgctatggactactggggccaaggaacctcagtcaccgtctcctcagagtctccaaa
ggcacaggcctcctcagtgcccactgcacaaccccaagcagagggcagcctcgccaaggcaaccacagccccagccacca
cccgtaacacaggaagaggcggcgaagagaagaaaaaggagaaggagaaagaggaacaagaagagagagagacaaagaca
ccaatctacatttgggccccgctcgcaggcacatgtggagtgctcctcctctccctggtgattaccctgtactgcaaaag
gggccgcaaaaaactcctttacatttttaagcagccttttatgaggccagtacagacgactcaagaggaagacgggtgctc
atgccgctttcctgaggaggaggaaggagggtgcgaactgcgcgttaagttctcccgatcagccgacgcgcctgcttacaa
gcagggccagaaccaactgtacaacgagctgaatctcggtagacgggaagagtacgacgtgttggacaaacggagaggccg
cgacccagaaatgggcggcaagcctcgcaggaaaaacccccaggagggactgtacaatgagttgcagaaagataagatggc
agaagcttatagcgagatcggaatgaagggggaaaggagacgagggaaaggacacgacggcctttatcagggcctgtccac
agcaacaaaagatacgtatgacgccctccatatgcaggcacttccaccacggtgataa
(amino acids)
(SEQ ID NO: 831)
MALPVTALLLPLALLLHAARPDIQMTQTTSSLSASLGDRVTISCRASQDISKYLNWYQQKPDGTVKLLIYHTSRLHSGVP
SRFSGSGSGTDYSLTISNLEQEDIATYFCQQGNTLPYTFGGGTKLEITGGGGSGGGGSGGGGSEVKLQESGPGLVAPSQS
LSVTCTVSGVSLPDYGVSWIRQPPRKGLEWLGVIWGSETTYYNSALKSRLTIIKDNSKSQVFLKMNSLQTDDTAIYYCAK
HYYYGGSYAMDYWGQGTSVTVSSESPKAQASSVPTAQPQAEGSLAKATTAPATTRNTGRGGEEKKKEKEKEEQEERETKT
PIYIWAPLAGTCGVLLLSLVITLYCKRGRKKLLYIFKQPFMRPVQTTQEEDGCSCRFPEEEEGGCELRVKFSRSADAPAY
KQGQNQLYNELNLGRREEYDVLDKRRGRDPEMGGKPRRKNPQEGLYNELQKDKMAEAYSEIGMKGERRRGKGHDGLYQGL
STATKDTYDALHMQALPPR**

[0449] Those skilled in the art will recognize, or be able to ascertain using no more than routine experimentation, many equivalents to the specific embodiments of the invention specifically described herein.

1.-97. (canceled)

98. An immune cell transfected or transduced with a cleavage enzyme for the treatment of cancer.

99. The immune cell of claim 98, wherein the cancer is a MUC1 positive cancer.

100. The immune cell of claim 98, wherein the immune cell is a T cell or NK cell.

101. The immune cell of claim 100, wherein the cell is derived from the patient to be treated.

102. The immune cell of claim 98, wherein the cleavage enzyme is an MMP or ADAM family member or a catalytically active fragment thereof.

103. The immune cell of claim 102, wherein the cleavage enzyme is MMP2, MMP9, MMP3, MMP14, ADAM17, ADAM28, or ADAM TS16.

104. An immune cell transfected or transduced with both a CAR comprising an antibody fragment, and a cleavage enzyme or catalytically active fragment thereof for the treatment of cancer.

105. The immune cell of claim 104, wherein the cancer is a MUC1 positive cancer.

106. The immune cell of claim 104, wherein the immune cell is a T cell or NK cell.

107. The immune cell of claim 104, wherein the antibody fragment of the CAR on the T cell directs the cell to a MUC1* positive tumor.

108. The immune cell of claim 104, wherein the antibody fragment of the CAR transduced into the immune cell recognizes a form of MUC1 after it is cleaved by the cleavage enzyme that is also transduced into the immune cell.

109. The immune cell of claim 108, wherein the antibody fragment of the CAR is derived from MNC2 or MNE6 and the cleavage enzyme is MMP9 or fragment of MMP9 or an activated form of MMP9.

110. The immune cell of claim 104, which is further transfected or transduced with an activator of the cleavage enzyme.

111. The immune cell of claim 110, wherein the cleavage enzyme is MMP9, and the activator of the cleavage enzyme is MMP3.

112. The immune cell of claim 104, wherein nucleic acid encoding the cleavage enzyme is linked to an inducible promoter.

113. The immune cell of claim 112, wherein expression of the cleavage enzyme is induced by an event that occurs specifically when the immune cell mounts an immune response to a target tumor cell.

114. The immune cell of claim 112, wherein the inducible promoter is induced by the presence of a NFAT family protein so as to express the cleavage enzyme, or the inducible promoter is a promoter for expression of NFAT protein.

115. The immune cell of claim 114, wherein the NFAT protein is NFATc1 also known as NFAT 2.

116. The immune cell of claim 112, wherein the immune cell is a T cell or NK cell.

117. The immune cell of claim 104, wherein the antibody fragment recognizes a form of MUC1 or MUC1* that is created when the cleavage enzyme cleaves MUC1 or MUC1*.

118. The immune cell of claim 112, wherein the antibody fragment is part of a CAR.

119. The immune cell of claim 112, wherein expression of the cleavage enzyme on the inducible promoter is induced when the antibody fragment of the CAR engages or binds to a MUC1 or MUC1* on the tumor.

120. (canceled)

121. A nucleic acid construct comprising nucleic acid encoding a cleavage enzyme or catalytically active fragment thereof located downstream of an NFAT promoter.

122. The nucleic acid construct of claim 121, wherein the NFAT is NFATc1.

123. The nucleic acid construct of claim 121, wherein the sequence of the promoter is any of the promoter sequence set forth as SEQ ID NOS:781-783, or a fragment or mutation thereof, which retains the activity of inducing expression of the cleavage enzyme or catalytically active fragment thereof.

124. The nucleic acid construct of claim 121, wherein the cleavage enzyme is MMP9.

125. The nucleic acid construct of claim 121, which is a plasmid.

126. An immune cell transfected or transduced with the nucleic acid construct of claim 121.

127. The immune cell according to claim 126, which is T cell or NK cell.

128. A method of treating or preventing cancer comprising administering to a patient the cell of claim 126.

129. The nucleic acid construct comprising nucleic acid encoding a cleavage enzyme or catalytically active fragment thereof located downstream of at least one NFAT response element.

130. The nucleic acid construct according to claim 129, wherein the NFAT response element comprises at least 2, 3, 4 response elements.

131. The nucleic acid construct of claim 129, wherein the sequence of the response element is any of the sequence set forth as SEQ ID NOS: 804-816, or a fragment or mutation thereof, which retains the activity of inducing expression of the cleavage enzyme or catalytically active fragment thereof.

132. The nucleic acid construct of claim 129, wherein the cleavage enzyme is MMP9.

133. The nucleic acid construct of claim 129, which is a plasmid.

134. An immune cell transfected or transduced with the nucleic acid construct of claim 129.

135. The immune cell according to claim 134, which is T cell or NK cell.

136. A method of treating or preventing cancer comprising administering to a patient the cell of claim 134.

137. A method of pre-activating an immune cell transduced or transfected with nucleic acid encoding CAR that is specific for MUC1* and/or MUC1 specific cleavage enzyme by co-culturing the immune cell in vitro on a surface that presents a peptide having the sequence of truncated extracellular domain of MUC1, thus obtaining pre-activated immune cell.

138. The method of claim 137, wherein the immune cell is T cell.

139. The method of claim 137, comprising further administering to a patient a composition comprising the obtained pre-activated immune cell.

140. The method of claim 137, wherein the surface is a bead, a cell culture plate or a cell.

141. The method of claim 140, wherein the cell is a MUC1* expressing cell

142. The method of claim 141, wherein the cell is a MUC1* expressing cancer cell.

143. The method of claim 142, wherein the cell is derived from the patient.

144. The method of claim 137, comprising removing the surface before administering the composition to the patient.

145. The method of claim 144, wherein when the surface is a cell, the cell is treated with ultraviolet light or is chemically inactivated such that the cell replicates a few times, and then administering to the patient.

146. An immune cell transfected or transduced with a plasmid encoding a CAR and a plasmid encoding a non-CAR species that is expressed from an inducible promoter.

147. The immune cell of claim 146 wherein the CAR comprises an antibody fragment, scFv or a peptide that binds to a tumor antigen.

148. The immune cell of claim 147, wherein tumor antigen is MUC1*.

149. The immune cell of claim 147, wherein the antibody fragment is derived from non-human, human or humanized MNC2, MNE6, MNC3 or MNC8.

150. The immune cell of claim 147, wherein the antibody fragment, scFv or peptide binds to a surface antigen of a B cell or a B cell precursor, CD19, CD20, CD22, BCMA, CD30, CD138, CD123, CD33 or LeY antigen.

151. The immune cell of claim 146, wherein the non-CAR species is expressed from an inducible promoter that is activated by elements of an activated immune cell.

152. The immune cell of claim 146, wherein the non-CAR species is expressed from an NFAT inducible promoter.

153. The immune cell of claim 152, wherein the NFAT is NFATc1, NFATc3 or NFATc2.

154. The immune cell of claim 146, wherein the non-CAR species is a cleavage enzyme.

155. The immune cell of claim 146, wherein the cleavage enzyme is MMP2, MMP3, MMP9, MMP13, MMP14, MMP16, ADAM10, ADAM17, or ADAM28, or a catalytically active fragment thereof.

156. The immune cell of claim 146, wherein the non-CAR species is a cytokine.

157. The immune cell of claim 156, wherein the cytokine is IL-7, IL-15 or IL-7 and IL-15.

158. A method of treating or preventing cancer comprising administering to a patient thereof, the immune cell of claim 146.

The application's sequence listing, which the Patent Office published only in electronic form, follows.

SEQUENCE LISTING (831 sequences)

SEQ ID NO: 1 - protein, 1255 aa, Artificial Sequence
  MUC1 Receptor
MTPGTQSPFFLLLLLTVLTVVTGSGHASSTPGGEKETSATQRSSVPSSTEKNAVSMTSSVLSSHSPGSGSSTTQGQDVTLAPATEPASGSAATWGQDVTSVPVTRPALGSTTPPAHDVTSAPDNKPAPGSTAPPAHGVTSAPDTRPAPGSTAPPAHGVTSAPDTRPAPGSTAPPAHGVTSAPDTRPAPGSTAPPAHGVTSAPDTRPAPGSTAPPAHGVTSAPDTRPAPGSTAPPAHGVTSAPDTRPAPGSTAPPAHGVTSAPDTRPAPGSTAPPAHGVTSAPDTRPAPGSTAPPAHGVTSAPDTRPAPGSTAPPAHGVTSAPDTRPAPGSTAPPAHGVTSAPDTRPAPGSTAPPAHGVTSAPDTRPAPGSTAPPAHGVTSAPDTRPAPGSTAPPAHGVTSAPDTRPAPGSTAPPAHGVTSAPDTRPAPGSTAPPAHGVTSAPDTRPAPGSTAPPAHGVTSAPDTRPAPGSTAPPAHGVTSAPDTRPAPGSTAPPAHGVTSAPDTRPAPGSTAPPAHGVTSAPDTRPAPGSTAPPAHGVTSAPDTRPAPGSTAPPAHGVTSAPDTRPAPGSTAPPAHGVTSAPDTRPAPGSTAPPAHGVTSAPDTRPAPGSTAPPAHGVTSAPDTRPAPGSTAPPAHGVTSAPDTRPAPGSTAPPAHGVTSAPDTRPAPGSTAPPAHGVTSAPDTRPAPGSTAPPAHGVTSAPDTRPAPGSTAPPAHGVTSAPDTRPAPGSTAPPAHGVTSAPDTRPAPGSTAPPAHGVTSAPDTRPAPGSTAPPAHGVTSAPDTRPAPGSTAPPAHGVTSAPDTRPAPGSTAPPAHGVTSAPDTRPAPGSTAPPAHGVTSAPDTRPAPGSTAPPAHGVTSAPDTRPAPGSTAPPAHGVTSAPDTRPAPGSTAPPAHGVTSAPDTRPAPGSTAPPAHGVTSAPDTRPAPGSTAPPAHGVTSAPDNRPALGSTAPPVHNVTSASGSASGSASTLVHNGTSARATTTPASKSTPFSIPSHHSDTPTTLASHSTKTDASSTHHSSVPPLTSSNHSTSPQLSTGVSFFFLSFHISNLQFNSSLEDPSTDYYQELQRDISEMFLQIYKQGGFLGLSNIKFRPGSVVVQLTLAFREGTINVHDVETQFNQYKTEAASRYNLTISDVSVSDVPFPFSAQSGAGVPGWGIALLVLVCVLVALAIVYLIALAVCQCRRKNYGQLDIFPARDTYHPMSEYPTYHTHGRYVPPSSTDRSPYEKVSAGNGGSSLSYTNPAVAAASANL

SEQ ID NO: 2 - protein, 45 aa, Artificial Sequence
  PSMGFR
GTINVHDVETQFNQYKTEAASRYNLTISDVSVSDVPFPFSAQSGA

SEQ ID NO: 3 - DNA, 459 bp, Artificial Sequence
  Human NME1
atggccaactgtgagcgtaccttcattgcgatcaaaccagatggggtccagcggggtcttgtgggagagattatcaagcgttttgagcagaaaggattccgccttgttggtctgaaattcatgcaagcttccgaagatcttctcaaggaacactacgttgacctgaaggaccgtccattctttgccggcctggtgaaatacatgcactcagggccggtagttgccatggtctgggaggggctgaatgtggtgaagacgggccgagtcatgctcggggagaccaaccctgcagactccaagcctgggaccatccgtggagacttctgcatacaagttggcaggaacattatacatggcagtgattctgtggagagtgcagagaaggagatcggcttgtggtttcaccctgaggaactggtagattacacgagctgtgctcagaactggatctatgaatga

SEQ ID NO: 4 - protein, 152 aa, Artificial Sequence
  Human NME1
MANCERTFIAIKPDGVQRGLVGEIIKRFEQKGFRLVGLKFMQASEDLLKEHYVDLKDRPFFAGLVKYMHSGPVVAMVWEGLNVVKTGRVMLGETNPADSKPGTIRGDFCIQVGRNIIHGSDSVESAEKEIGLWFHPEELVDYTSCAQNWIYE

SEQ ID NO: 5 - DNA, 1131 bp, Artificial Sequence
  Human NME7
atgaatcatagtgaaagattcgttttcattgcagagtggtatgatccaaatgcttcacttcttcgacgttatgagcttttattttacccaggggatggatctgttgaaatgcatgatgtaaagaatcatcgcacctttttaaagcggaccaaatatgataacctgcacttggaagatttatttataggcaacaaagtgaatgtcttttctcgacaactggtattaattgactatggggatcaatatacagctcgccagctgggcagtaggaaagaaaaaacgctagccctaattaaaccagatgcaatatcaaaggctggagaaataattgaaataataaacaaagctggatttactataaccaaactcaaaatgatgatgctttcaaggaaagaagcattggattttcatgtagatcaccagtcaagaccctttttcaatgagctgatccagtttattacaactggtcctattattgccatggagattttaagagatgatgctatatgtgaatggaaaagactgctgggacctgcaaactctggagtggcacgcacagatgcttctgaaagcattagagccctctttggaacagatggcataagaaatgcagcgcatggccctgattcttttgcttctgcggccagagaaatggagttgttttttccttcaagtggaggttgtgggccggcaaacactgctaaatttactaattgtacctgttgcattgttaaaccccatgctgtcagtgaaggactgttgggaaagatcctgatggctatccgagatgcaggttttgaaatctcagctatgcagatgttcaatatggatcgggttaatgttgaggaattctatgaagtttataaaggagtagtgaccgaatatcatgacatggtgacagaaatgtattctggcccttgtgtagcaatggagattcaacagaataatgctacaaagacatttcgagaattttgtggacctgctgatcctgaaattgcccggcatttacgccctggaactctcagagcaatctttggtaaaactaagatccagaatgctgttcactgtactgatctgccagaggatggcctattagaggttcaatacttcttcaagatcttggataattag

SEQ ID NO: 6 - protein, 376 aa, Artificial Sequence
  Human NME7
MNHSERFVFIAEWYDPNASLLRRYELLFYPGDGSVEMHDVKNHRTFLKRTKYDNLHLEDLFIGNKVNVFSRQLVLIDYGDQYTARQLGSRKEKTLALIKPDAISKAGEIIEIINKAGFTITKLKMMMLSRKEALDFHVDHQSRPFFNELIQFITTGPIIAMEILRDDAICEWKRLLGPANSGVARTDASESIRALFGTDGIRNAAHGPDSFASAAREMELFFPSSGGCGPANTAKFTNCTCCIVKPHAVSEGLLGKILMAIRDAGFEISAMQMFNMDRVNVEEFYEVYKGVVTEYHDMVTEMYSGPCVAMEIQQNNATKTFREFCGPADPEIARHLRPGTLRAIFGKTKIQNAVHCTDLPEDGLLEVQYFFKILDN

SEQ ID NO: 7 - protein, 16 aa, Artificial Sequence
  NME7 peptide 1 (A domain)
MLSRKEALDFHVDHQS

SEQ ID NO: 8 - protein, 11 aa, Artificial Sequence
  NME7A peptide 2 (A domain)
SGVARTDASES

SEQ ID NO: 9 - protein, 20 aa, Artificial Sequence
  NME7B peptide 1 (B domain)
DAGFEISAMQMFNMDRVNVE

SEQ ID NO: 10 - protein, 16 aa, Artificial Sequence
  NME7B peptide 2 (B domain)
EVYKGVVTEYHDMVTE

SEQ ID NO: 11 - protein, 29 aa, Artificial Sequence
  NME7B peptide 3 (B domain)
AIFGKTKIQNAVHCTDLPEDGLLEVQYFF

SEQ ID NO: 12 - DNA, 366 bp, Artificial Sequence
  Mouse E6 Heavy chain variable region sequence
gaggtgaaggtggtggagtctgggggagacttagtgaagcctggagggtccctgaaactctcctgtgtagtctctggattcactttcagtagatatggcatgtcttgggttcgccagactccaggcaagaggctggagtgggtcgcaaccattagtggtggcggtacttacatctactatccagacagtgtgaaggggcgattcaccatctccagagacaatgccaagaacaccctgtacctgcaaatgagcagtctgaagtctgaggacacagccatgtatcactgtacaagggataactacggtaggaactacgactacggtatggactactggggtcaaggaacctcagtcaccgtctcctca

SEQ ID NO: 13 - protein, 122 aa, Artificial Sequence
  Mouse E6 Heavy chain variable region sequence
EVKVVESGGDLVKPGGSLKLSCVVSGFTFSRYGMSWVRQTPGKRLEWVATISGGGTYIYYPDSVKGRFTISRDNAKNTLYLQMSSLKSEDTAMYHCTRDNYGRNYDYGMDYWGQGTSVTVSS

SEQ ID NO: 14 - DNA, 75 bp, Artificial Sequence
  Mouse E6 heavy chain variable framework region 1 (FWR1) sequence
gaggtgaaggtggtggagtctgggggagacttagtgaagcctggagggtccctgaaactctcctgtgtagtctct

SEQ ID NO: 15 - protein, 30 aa, Artificial Sequence
  Mouse E6 heavy chain variable framework region 1 (FWR1) sequence
EVKVVESGGDLVKPGGSLKLSCVVSGFTFS

SEQ ID NO: 16 - DNA, 30 bp, Artificial Sequence
  Mouse E6 heavy chain variable complementarity determining regions 1 (CDR1) sequence
ggattcactttcagtagatatggcatgtct

SEQ ID NO: 17 - protein, 5 aa, Artificial Sequence
  Mouse E6 heavy chain variable complementarity determining regions 1 (CDR1) sequence
RYGMS

SEQ ID NO: 18 - DNA, 42 bp, Artificial Sequence
  Mouse E6 heavy chain variable framework region 2 (FWR2) sequence
tgggttcgccagactccaggcaagaggctggagtgggtcgca

SEQ ID NO: 19 - protein, 14 aa, Artificial Sequence
  Mouse E6 heavy chain variable framework region 2 (FWR2) sequence
WVRQTPGKRLEWVA

SEQ ID NO: 20 - DNA, 51 bp, Artificial Sequence
  Mouse E6 heavy chain variable complementarity determining regions 2 (CDR2) sequence
accattagtggtggcggtacttacatctactatccagacagtgtgaagggg

SEQ ID NO: 21 - protein, 17 aa, Artificial Sequence
  Mouse E6 heavy chain variable complementarity determining regions 2 (CDR2) sequence
TISGGGTYIYYPDSVKG

SEQ ID NO: 22 - DNA, 96 bp, Artificial Sequence
  Mouse E6 heavy chain variable framework region 3 (FWR3) acid sequence
cgattcaccatctccagagacaatgccaagaacaccctgtacctgcaaatgagcagtctgaagtctgaggacacagccatgtatcactgtacaagg

SEQ ID NO: 23 - protein, 32 aa, Artificial Sequence
  Mouse E6 heavy chain variable framework region 3 (FWR3) acid sequence
RFTISRDNAKNTLYLQMSSLKSEDTAMYHCTR

SEQ ID NO: 24 - DNA, 39 bp, Artificial Sequence
  Mouse E6 heavy chain variable complementarity determining regions 3 (CDR3) sequence
gataactacggtaggaactacgactacggtatggactac

SEQ ID NO: 25 - protein, 13 aa, Artificial Sequence
  Mouse E6 heavy chain variable complementarity determining regions 3 (CDR3) sequence
DNYGRNYDYGMDY

SEQ ID NO: 26 - DNA, 294 bp, Artificial Sequence
  IGHV3-21*03 heavy chain variable region sequence
gaggtgcagctggtggagtctgggggaggcctggtcaagcctggggggtccctgagactctcctgtgcagcctctggattcaccttcagtagctatagcatgaactgggtccgccaggctccagggaaggggctggagtgggtctcatccattagtagtagtagtagttacatatactacgcagactcagtgaagggccgattcaccatctccagagacaacgccaagaactcactgtatctgcaaatgaacagcctgagagccgaggacacggctgtgtattactgtgcgaga

SEQ ID NO: 27 - protein, 98 aa, Artificial Sequence
  IGHV3-21*03 heavy chain variable region sequence
EVQLVESGGGLVKPGGSLRLSCAASGFTFSSYSMNWVRQAPGKGLEWVSSISSSSSYIYYADSVKGRFTISRDNAKNSLYLQMNSLRAEDTAVYYCAR

SEQ ID NO: 28 - DNA, 90 bp, Artificial Sequence
  IGHV3-21*01 heavy chain variable framework region 1 (FWR1) sequence
gaggtgcagctggtggagtctgggggaggcctggtcaagcctggggggtccctgagactctcctgtgcagcctctggattcaccttcagt

SEQ ID NO: 29 - protein, 30 aa, Artificial Sequence
  IGHV3-21*01 heavy chain variable framework region 1 (FWR1) sequence
EVQLVESGGGLVKPGGSLRLSCAASGFTFS

SEQ ID NO: 30 - DNA, 15 bp, Artificial Sequence
  IGHV3-21*01 heavy chain variable complementarity determining regions 1 (CDR1) sequence
agctatagcatgaac

SEQ ID NO: 31 - protein, 5 aa, Artificial Sequence
  IGHV3-21*01 heavy chain variable complementarity determining regions 1 (CDR1) sequence
SYSMN

SEQ ID NO: 32 - DNA, 42 bp, Artificial Sequence
  IGHV3-21*01 heavy chain variable framework region 2 (FWR2) sequence
tgggtccgccaggctccagggaaggggctggagtgggtctca

SEQ ID NO: 33 - protein, 14 aa, Artificial Sequence
  IGHV3-21*01 heavy chain variable framework region 2 (FWR2) sequence
WVRQAPGKGLEWVS

SEQ ID NO: 34 - DNA, 51 bp, Artificial Sequence
  IGHV3-21*01 heavy chain variable complementarity determining regions 2 (CDR2) sequence
tccattagtagtagtagtagttacatatactacgcagactcagtgaagggc

SEQ ID NO: 35 - protein, 17 aa, Artificial Sequence
  IGHV3-21*01 heavy chain variable complementarity determining regions 2 (CDR2) sequence
SISSSSSYIYYADSVKG

SEQ ID NO: 36 - DNA, 96 bp, Artificial Sequence
  IGHV3-21*01 heavy chain variable framework region 3 (FWR3) sequence
cgattcaccatctccagagacaacgccaagaactcactgtatctgcaaatgaacagcctgagagccgaggacacggctgtgtattactgtgcgaga

SEQ ID NO: 37 - protein, 32 aa, Artificial Sequence
  IGHV3-21*01 heavy chain variable framework region 3 (FWR3) sequence
RFTISRDNAKNSLYLQMNSLRAEDTAVYYCAR

SEQ ID NO: 38 - DNA, 366 bp, Artificial Sequence
  Humanized E6 heavy chain variable region sequence
gaggtgcagctggtggagtctgggggaggcctggtcaagcctggggggtccctgagactctcctgtgcagcctctggattcaccttcagtaggtatggcatgagctgggtccgccaggctccagggaagaggctggagtgggtctcaaccattagtggcggaggcacctacatatactacccagactcagtgaagggccgattcaccatctccagagacaacgccaagaacaccctgtatctgcaaatgaacagcctgagagccgaggacacggctgtgtattactgtaccagagataactatggccgcaactatgattatggcatggattattggggccagggcaccctggtgaccgtgagcagc

SEQ ID NO: 39 - protein, 122 aa, Artificial Sequence
  Humanized E6 heavy chain variable region sequence
EVQLVESGGGLVKPGGSLRLSCAASGFTFSRYGMSWVRQAPGKRLEWVSTISGGGTYIYYPDSVKGRFTISRDNAKNTLYLQMNSLRAEDTAVYYCTRDNYGRNYDYGMDYWGQGTLVTVSS

SEQ ID NO: 40 - DNA, 90 bp, Artificial Sequence; identical to SEQ ID NO: 28
  Humanized E6 heavy chain variable framework region 1 (FWR1) acid sequence

SEQ ID NO: 41 - protein, 30 aa, Artificial Sequence; identical to SEQ ID NO: 29
  Humanized E6 heavy chain variable framework region 1 (FWR1) acid sequence

SEQ ID NO: 42 - DNA, 15 bp, Artificial Sequence
  Humanized E6 heavy chain variable complementarity determining regions 1 (CDR1) sequence
aggtatggcatgagc

SEQ ID NO: 43 - protein, 5 aa, Artificial Sequence
  Humanized E6 heavy chain variable complementarity determining regions 1 (CDR1) sequence
RYGMS

SEQ ID NO: 44 - DNA, 42 bp, Artificial Sequence
  Humanized E6 heavy chain variable framework region 2 (FWR2) acid sequence
tgggtccgccaggctccagggaagaggctggagtgggtctca

SEQ ID NO: 45 - protein, 14 aa, Artificial Sequence
  Humanized E6 heavy chain variable framework region 2 (FWR2) acid sequence
WVRQAPGKRLEWVS

SEQ ID NO: 46 - DNA, 51 bp, Artificial Sequence
  Humanized E6 heavy chain variable complementarity determining regions 2 (CDR2) sequence
accattagtggcggaggcacctacatatactacccagactcagtgaagggc

SEQ ID NO: 47 - protein, 17 aa, Artificial Sequence
  Humanized E6 heavy chain variable complementarity determining regions 2 (CDR2) sequence
TISGGGTYIYYPDSVKG

SEQ ID NO: 48 - DNA, 96 bp, Artificial Sequence
  Humanized E6 heavy chain variable framework region 3 (FWR3) acid sequence
cgattcaccatctccagagacaacgccaagaacaccctgtatctgcaaatgaacagcctgagagccgaggacacggctgtgtattactgtaccaga

SEQ ID NO: 49 - protein, 32 aa, Artificial Sequence
  Humanized E6 heavy chain variable framework region 3 (FWR3) acid sequence
RFTISRDNAKNTLYLQMNSLRAEDTAVYYCTR

SEQ ID NO: 50 - DNA, 39 bp, Artificial Sequence
  Humanized E6 heavy chain variable complementarity determining regions 3 (CDR3) sequence
gataactatggccgcaactatgattatggcatggattat

SEQ ID NO: 51 - protein, 13 aa, Artificial Sequence
  Humanized E6 heavy chain variable complementarity determining regions 3 (CDR3) sequence
DNYGRNYDYGMDY

SEQ ID NO: 52 - DNA, 1442 bp, Artificial Sequence
  Humanized E6 IgG2 heavy chain synthesized by Genescript
gaattctaagcttgggccaccatggaactggggctccgctgggttttccttgttgctattttagaaggtgtccagtgtgaggtgcagctggtggagtctgggggaggcctggtcaagcctggggggtccctgagactctcctgtgcagcctctggattcaccttcagtaggtatggcatgagctgggtccgccaggctccagggaagaggctggagtgggtctcaaccattagtggcggaggcacctacatatactacccagactcagtgaagggccgattcaccatctccagagacaacgccaagaacaccctgtatctgcaaatgaacagcctgagagccgaggacacggctgtgtattactgtaccagagataactatggccgcaactatgattatggcatggattattggggccagggcaccctggtgaccgtgagcagcgcctccaccaagggcccatcggtcttccccctggcgccctgctccaggagcacctccgagagcacagccgccctgggctgcctggtcaaggactacttccccgaaccggtgacggtgtcgtggaactcaggcgctctgaccagcggcgtgcacaccttcccagctgtcctacagtcctcaggactctactccctcagcagcgtggtgaccgtgccctccagcaacttcggcacccagacctacacctgcaacgtagatcacaagcccagcaacaccaaggtggacaagacagttgagcgcaaatgttgtgtcgagtgcccaccgtgcccagcaccacctgtggcaggaccgtcagtcttcctcttccccccaaaacccaaggacaccctcatgatctcccggacccctgaggtcacgtgcgtggtggtggacgtgagccacgaagaccccgaggtccagttcaactggtacgtggacggcgtggaggtgcataatgccaagacaaagccacgggaggagcagttcaacagcacgttccgtgtggtcagcgtcctcaccgttgtgcaccaggactggctgaacggcaaggagtacaagtgcaaggtctccaacaaaggcctcccagcccccatcgagaaaaccatctccaaaaccaaagggcagccccgagaaccacaggtgtacaccctgcccccatcccgggaggagatgaccaagaaccaggtcagcctgacctgcctggtcaaaggcttctaccccagcgacatcgccgtggagtgggagagcaatgggcagccggagaacaactacaagaccacacctcccatgctggactccgacggctccttcttcctctacagcaagctcaccgtggacaagagcaggtggcagcaggggaacgtcttctcatgctccgtgatgcatgaggctctgcacaaccactacacgcagaagagcctctccctgtctccgggtaaatagtaagtttaaactctaga

SEQ ID NO: 53 - protein, 477 aa, Artificial Sequence
  Humanized E6 IgG2 heavy chain synthesized by Genescript
  misc_feature (477)..(477): Xaa can be any naturally occurring amino acid
EFAWATMELGLRWVFLVAILEGVQCEVQLVESGGGLVKPGGSLRLSCAASGFTFSRYGMSWVRQAPGKRLEWVSTISGGGTYIYYPDSVKGRFTISRDNAKNTLYLQMNSLRAEDTAVYYCTRDNYGRNYDYGMDYWGQGTLVTVSSASTKGPSVFPLAPCSRSTSESTAALGCLVKDYFPEPVTVSWNSGALTSGVHTFPAVLQSSGLYSLSSVVTVPSSNFGTQTYTCNVDHKPSNTKVDKTVERKCCVECPPCPAPPVAGPSVFLFPPKPKDTLMISRTPEVTCVVVDVSHEDPEVQFNWYVDGVEVHNAKTKPREEQFNSTFRVVSVLTVVHQDWLNGKEYKCKVSNKGLPAPIEKTISKTKGQPREPQVYTLPPSREEMTKNQVSLTCLVKGFYPSDIAVEWESNGQPENNYKTTPPMLDSDGSFFLYSKLTVDKSRWQQGNVFSCSVMHEALHNHYTQKSLSLSPGKVTLX

SEQ ID NO: 54 - DNA, 981 bp, Artificial Sequence
  Human IgG2 heavy chain constant region sequence
gcctccaccaagggcccatcggtcttccccctggcgccctgctccaggagcacctccgagagcacagccgccctgggctgcctggtcaaggactacttccccgaaccggtgacggtgtcgtggaactcaggcgctctgaccagcggcgtgcacaccttcccagctgtcctacagtcctcaggactctactccctcagcagcgtggtgaccgtgccctccagcaacttcggcacccagacctacacctgcaacgtagatcacaagcccagcaacaccaaggtggacaagacagttgagcgcaaatgttgtgtcgagtgcccaccgtgcccagcaccacctgtggcaggaccgtcagtcttcctcttccccccaaaacccaaggacaccctcatgatctcccggacccctgaggtcacgtgcgtggtggtggacgtgagccacgaagaccccgaggtccagttcaactggtacgtggacggcgtggaggtgcataatgccaagacaaagccacgggaggagcagttcaacagcacgttccgtgtggtcagcgtcctcaccgttgtgcaccaggactggctgaacggcaaggagtacaagtgcaaggtctccaacaaaggcctcccagcccccatcgagaaaaccatctccaaaaccaaagggcagccccgagaaccacaggtgtacaccctgcccccatcccgggaggagatgaccaagaaccaggtcagcctgacctgcctggtcaaaggcttctaccccagcgacatcgccgtggagtgggagagcaatgggcagccggagaacaactacaagaccacacctcccatgctggactccgacggctccttcttcctctacagcaagctcaccgtggacaagagcaggtggcagcaggggaacgtcttctcatgctccgtgatgcatgaggctctgcacaaccactacacgcagaagagcctctccctgtctccgggtaaatag

SEQ ID NO: 55 - protein, 326 aa, Artificial Sequence
  Human IgG2 heavy chain constant region sequence
ASTKGPSVFPLAPCSRSTSESTAALGCLVKDYFPEPVTVSWNSGALTSGVHTFPAVLQSSGLYSLSSVVTVPSSNFGTQTYTCNVDHKPSNTKVDKTVERKCCVECPPCPAPPVAGPSVFLFPPKPKDTLMISRTPEVTCVVVDVSHEDPEVQFNWYVDGVEVHNAKTKPREEQFNSTFRVVSVLTVVHQDWLNGKEYKCKVSNKGLPAPIEKTISKTKGQPREPQVYTLPPSREEMTKNQVSLTCLVKGFYPSDIAVEWESNGQPENNYKTTPPMLDSDGSFFLYSKLTVDKSRWQQGNVFSCSVMHEALHNHYTQKSLSLSPGK

SEQ ID NO: 56 - DNA, 1362 bp, Artificial Sequence
  Humanized E6 IgG1 heavy chain sequence
gaggtgcagctggtggagtctgggggaggcctggtcaagcctggggggtccctgagactctcctgtgcagcctctggattcaccttcagtaggtatggcatgagctgggtccgccaggctccagggaagaggctggagtgggtctcaaccattagtggcggaggcacctacatatactacccagactcagtgaagggccgattcaccatctccagagacaacgccaagaacccactgtatctgcaaatgaacagcctgagagccgaggacacggctgtgtattactgtcccagagataactatggccgcaactatgattatggcatggattattggggccagggcaccctggtgaccgtgagcagcgctagcaccaagggcccatcggtcttccccctggcaccctcctccaagagcacctctgggggcacagcggccctgggctgcctggtcaaggactacttccccgaaccggtgacggtgtcgtggaactcaggcgccctgaccagcggcgtgcacaccttcccggctgtcctacagtcctcaggactctactccctcagcagcgtggtgacagtgccctccagcagcttgggcacccagacctacatctgcaacgtgaatcacaagcccagcaacaccaaggtggacaagaaagttgagcccaaatcttgtgacaaaactcacacatgcccaccgtgcccagcacctgaactcctggggggaccgtcagtcttcctcttccccccaaaacccaaggacaccctcatgatctcccggacccctgaggtcacatgcgtggtggtggacgtgagccacgaagaccctgaggtcaagttcaactggtacgtggacggcgtggaggtgcataatgccaagacaaagccgcgggaggagcagtacaacagcacgtaccgtgtggtcagcgtcctcaccgtcctgcaccaggactggctgaatggcaaggagtacaagtgcaaggtctccaacaaagccctcccagcccccatcgagaaaaccatctccaaagccaaagggcagccccgagaaccacaggtgtacaccctgcccccatcccgggaggagatgaccaagaaccaggtcagcctgacctgcctggtcaaaggcttctatcccagcgacatcgccgtggagtgggagagcaatgggcagccggagaacaactacaagaccacgcctcccgtgctggactccgacggctccttcttcctctacagcaagctcaccgtggacaagagcaggtggcagcaggggaacgtcttctcatgctccgtgatgcatgaggctctgcacaaccactacacgcagaagagcctctccctgtctccgggtaaatgataa

SEQ ID NO: 57 - protein, 452 aa, Artificial Sequence
  Humanized E6 IgG1 heavy chain sequence
EVQLVESGGGLVKPGGSLRLSCAASGFTFSRYGMSWVRQAPGKRLEWVSTISGGGTYIYYPDSVKGRFTISRDNAKNPLYLQMNSLRAEDTAVYYCPRDNYGRNYDYGMDYWGQGTLVTVSSASTKGPSVFPLAPSSKSTSGGTAALGCLVKDYFPEPVTVSWNSGALTSGVHTFPAVLQSSGLYSLSSVVTVPSSSLGTQTYICNVNHKPSNTKVDKKVEPKSCDKTHTCPPCPAPELLGGPSVFLFPPKPKDTLMISRTPEVTCVVVDVSHEDPEVKFNWYVDGVEVHNAKTKPREEQYNSTYRVVSVLTVLHQDWLNGKEYKCKVSNKALPAPIEKTISKAKGQPREPQVYTLPPSREEMTKNQVSLTCLVKGFYPSDIAVEWESNGQPENNYKTTPPVLDSDGSFFLYSKLTVDKSRWQQGNVFSCSVMHEALHNHYTQKSLSLSPGK

SEQ ID NO: 58 - DNA, 996 bp, Artificial Sequence
  Human IgG1 heavy chain constant region sequence
gctagcaccaagggcccatcggtcttccccctggcaccctcctccaagagcacctctgggggcacagcggccctgggctgcctggtcaaggactacttccccgaaccggtgacggtgtcgtggaactcaggcgccctgaccagcggcgtgcacaccttcccggctgtcctacagtcctcaggactctactccctcagcagcgtggtgacagtgccctccagcagcttgggcacccagacctacatctgcaacgtgaatcacaagcccagcaacaccaaggtggacaagaaagttgagcccaaatcttgtgacaaaactcacacatgcccaccgtgcccagcacctgaactcctggggggaccgtcagtcttcctcttccccccaaaacccaaggacaccctcatgatctcccggacccctgaggtcacatgcgtggtggtggacgtgagccacgaagaccctgaggtcaagttcaactggtacgtggacggcgtggaggtgcataatgccaagacaaagccgcgggaggagcagtacaacagcacgtaccgtgtggtcagcgtcctcaccgtcctgcaccaggactggctgaatggcaaggagtacaagtgcaaggtctccaacaaagccctcccagcccccatcgagaaaaccatctccaaagccaaagggcagccccgagaaccacaggtgtacaccctgcccccatcccgggaggagatgaccaagaaccaggtcagcctgacctgcctggtcaaaggcttctatcccagcgacatcgccgtggagtgggagagcaatgggcagccggagaacaactacaagaccacgcctcccgtgctggactccgacggctccttcttcctctacagcaagctcaccgtggacaagagcaggtggcagcaggggaacgtcttctcatgctccgtgatgcatgaggctctgcacaaccactacacgcagaagagcctctccctgtctccgggtaaatgataa

SEQ ID NO: 59 - protein, 330 aa, Artificial Sequence
  Human IgG1 heavy chain constant region sequence
ASTKGPSVFPLAPSSKSTSGGTAALGCLVKDYFPEPVTVSWNSGALTSGVHTFPAVLQSSGLYSLSSVVTVPSSSLGTQTYICNVNHKPSNTKVDKKVEPKSCDKTHTCPPCPAPELLGGPSVFLFPPKPKDTLMISRTPEVTCVVVDVSHEDPEVKFNWYVDGVEVHNAKTKPREEQYNSTYRVVSVLTVLHQDWLNGKEYKCKVSNKALPAPIEKTISKAKGQPREPQVYTLPPSREEMTKNQVSLTCLVKGFYPSDIAVEWESNGQPENNYKTTPPVLDSDGSFFLYSKLTVDKSRWQQGNVFSCSVMHEALHNHYTQKSLSLSPGK

SEQ ID NO: 60 - DNA, 560 bp, Artificial Sequence
  Human IgG1 heavy chain constant region gBLOCK#1 sequence
atggcatggattattggggccagggcaccctggtgaccgtgagcagcgctagcaccaagggcccatcggtcttccccctggcaccctcctccaagagcacctctgggggcacagcggccctgggctgcctggtcaaggactacttccccgaaccggtgacggtgtcgtggaactcaggcgccctgaccagcggcgtgcacaccttcccggctgtcctacagtcctcaggactctactccctcagcagcgtggtgacagtgccctccagcagcttgggcacccagacctacatctgcaacgtgaatcacaagcccagcaacaccaaggtggacaagaaagttgagcccaaatcttgtgacaaaactcacacatgcccaccgtgcccagcacctgaactcctggggggaccgtcagtcttcctcttccccccaaaacccaaggacaccctcatgatctcccggacccctgaggtcacatgcgtggtggtggacgtgagccacgaagaccctgaggtcaagttcaactggtacgtggacggcgtggaggtgcataatgccaag

SEQ ID NO: 61 - DNA, 557 bp, Artificial Sequence
  Human IgG1 heavy chain constant region gBLOCK#2 sequence
tacgtggacggcgtggaggtgcataatgccaagacaaagccgcgggaggagcagtacaacagcacgtaccgtgtggtcagcgtcctcaccgtcctgcaccaggactggctgaatggcaaggagtacaagtgcaaggtctccaacaaagccctcccagcccccatcgagaaaaccatctccaaagccaaagggcagccccgagaaccacaggtgtacaccctgcccccatcccgggaggagatgaccaagaaccaggtcagcctgacctgcctggtcaaaggcttctatcccagcgacatcgccgtggagtgggagagcaatgggcagccggagaacaactacaagaccacgcctcccgtgctggactccgacggctccttcttcctctacagcaagctcaccgtggacaagagcaggtggcagcaggggaacgtcttctcatgctccgtgatgcatgaggctctgcacaaccactacacgcagaagagcctctccctgtctccgggtaaatgataagtttaaacccgctgatcagcctcgactgtgccttctagttg

SEQ ID NO: 62 - DNA, 31 bp, Artificial Sequence
  E6 heavy chain variable region overlapping sequence
atggcatggattattggggccagggcaccct

SEQ ID NO: 63 - DNA, 33 bp, Artificial Sequence
  IgG1 heavy chain constant region overlapping region sequence
tacgtggacggcgtggaggtgcataatgccaag

SEQ ID NO: 64 - DNA, 33 bp, Artificial Sequence
  pCDNA3.1 V5 and pSECTag2 overlapping sequence
ccgctgatcagcctcgactgtgccttctagttg

SEQ ID NO: 65 - DNA, 318 bp, Artificial Sequence
  Mouse E6 Light Chain variable region sequence
caaattgttctcacccagtctccagcaatcatgtctgcatctccaggggaggaggtcaccctaacctgcagtgccacctcaagtgtaagttacatacactggttccagcagaggccaggcacttctcccaaactctggatttatagcacatccaacctggcttctggagtccctgttcgcttcagtggcagtggatatgggacctcttactctctcacaatcagccgaatggaggctgaagatgctgccacttattactgccagcaaaggagtagttccccattcacgttcggctcggggacaaagttggaaataaaa

SEQ ID NO: 66 - protein, 106 aa, Artificial Sequence
  Mouse E6 Light Chain variable region sequence
QIVLTQSPAIMSASPGEEVTLTCSATSSVSYIHWFQQRPGTSPKLWIYSTSNLASGVPVRFSGSGYGTSYSLTISRMEAEDAATYYCQQRSSSPFTFGSGTKLEIK

SEQ ID NO: 67 - DNA, 69 bp, Artificial Sequence
  Mouse E6 light chain variable framework region 1 (FWR1) sequence
caaattgttctcacccagtctccagcaatcatgtctgcatctccaggggaggaggtcaccctaacctgc

SEQ ID NO: 68 - protein, 23 aa, Artificial Sequence
  Mouse E6 light chain variable framework region 1 (FWR1) sequence
QIVLTQSPAIMSASPGEEVTLTC

SEQ ID NO: 69 - DNA, 30 bp, Artificial Sequence
  Mouse E6 light chain variable complementarity determining regions 1 (CDR1) sequence
agtgccacctcaagtgtaagttacatacac

SEQ ID NO: 70 - protein, 10 aa, Artificial Sequence
  Mouse E6 light chain variable complementarity determining regions 1 (CDR1) sequence
SATSSVSYIH

SEQ ID NO: 71 - DNA, 45 bp, Artificial Sequence
  Mouse E6 light chain variable framework region 2 (FWR2) sequence
tggttccagcagaggccaggcacttctcccaaactctggatttat

SEQ ID NO: 72 - protein, 15 aa, Artificial Sequence
  Mouse E6 light chain variable framework region 2 (FWR2) sequence
WFQQRPGTSPKLWIY

SEQ ID NO: 73 - DNA, 21 bp, Artificial Sequence
  Mouse E6 light chain variable complementarity determining regions 2 (CDR2) sequence
agcacatccaacctggcttct

SEQ ID NO: 74 - protein, 7 aa, Artificial Sequence
  Mouse E6 light chain variable complementarity determining regions 2 (CDR2) sequence
STSNLAS

SEQ ID NO: 75 - DNA, 96 bp, Artificial Sequence
  Mouse E6 light chain variable framework region 3 (FWR3) sequence
ggagtccctgttcgcttcagtggcagtggatatgggacctcttactctctcacaatcagccgaatggaggctgaagatgctgccacttattactgc

SEQ ID NO: 76 - protein, 32 aa, Artificial Sequence
  Mouse E6 light chain variable framework region 3 (FWR3) sequence
GVPVRFSGSGYGTSYSLTISRMEAEDAATYYC

SEQ ID NO: 77 - DNA, 27 bp, Artificial Sequence
  Mouse E6 light chain variable complementarity determining regions 3 (CDR3) sequence
cagcaaaggagtagttccccattcacg

SEQ ID NO: 78 - protein, 9 aa, Artificial Sequence
  Mouse E6 light chain variable complementarity determining regions 3 (CDR3) sequence
QQRSSSPFT

SEQ ID NO: 79 - DNA, 287 bp, Artificial Sequence
  IGKV3-11*02 light chain variable region sequence
gaaattgtgttgacacagtctccagccaccctgtctttgtctccaggggaaagagccaccctctcctgcagggccagtcagagtgttagcagctacttagcctggtaccaacagaaacctggccaggctcccaggctcctcatctatgatgcatccaacagggccactggcatcccagccaggttcagtggcagtgggtctgggagagacttcactctcaccatcagcagcctagagcctgaagattttgcagtttattactgtcagcagcgtagcaactggcctcc

SEQ ID NO: 80 - protein, 96 aa, Artificial Sequence
  IGKV3-11*02 light chain variable region sequence
EIVLTQSPATLSLSPGERATLSCRASQSVSSYLAWYQQKPGQAPRLLIYDASNRATGIPARFSGSGSGRDFTLTISSLEPEDFAVYYCQQRSNWPP

SEQ ID NO: 81 - DNA, 69 bp, Artificial Sequence
  IGKV3-11*02 light chain variable framework region 1 (FWR1) acid sequence
gaaattgtgttgacacagtctccagccaccctgtctttgtctccaggggaaagagccaccctctcctgc

SEQ ID NO: 82 - protein, 23 aa, Artificial Sequence
  IGKV3-11*02 light chain variable framework region 1 (FWR1) acid sequence
EIVLTQSPATLSLSPGERATLSC

SEQ ID NO: 83 - DNA, 33 bp, Artificial Sequence
  IGKV3-11*02 light chain variable complementarity determining regions 1 (CDR1) sequence
agggccagtcagagtgttagcagctacttagcc

SEQ ID NO: 84 - protein, 11 aa, Artificial Sequence
  IGKV3-11*02 light chain variable complementarity determining regions 1 (CDR1) sequence
RASQSVSSYLA

SEQ ID NO: 85 - DNA, 45 bp, Artificial Sequence
  IGKV3-11*02 light chain variable framework region 2 (FWR2) sequence
tggtaccaacagaaacctggccaggctcccaggctcctcatctat

SEQ ID NO: 86 - protein, 15 aa, Artificial Sequence
  IGKV3-11*02 light chain variable framework region 2 (FWR2) sequence
WYQQKPGQAPRLLIY

SEQ ID NO: 87 - DNA, 21 bp, Artificial Sequence
  IGKV3-11*02 light chain variable complementarity determining regions 2 (CDR2) sequence
gatgcatccaacagggccact

SEQ ID NO: 88 - protein, 7 aa, Artificial Sequence
  IGKV3-11*02 light chain variable complementarity determining regions 2 (CDR2) sequence
DASNRAT

SEQ ID NO: 89 - DNA, 96 bp, Artificial Sequence
  IGKV3-11*02 light chain variable framework region 3 (FWR3) sequence
ggcatcccagccaggttcagtggcagtgggtctgggagagacttcactctcaccatcagcagcctagagcctgaagattttgcagtttattactgt

SEQ ID NO: 90 - protein, 32 aa, Artificial Sequence
  IGKV3-11*02 light chain variable framework region 3 (FWR3) sequence
GIPARFSGSGSGTDFTLTISSLEPEDFAVYYC

SEQ ID NO: 91 - DNA, 23 bp, Artificial Sequence
  IGKV3-11*02 light chain variable complementarity determining regions3 (CDR3) sequence
cagcagcgtagcaactggcctcc

SEQ ID NO: 92 - protein, 8 aa, Artificial Sequence
  IGKV3-11*02 light chain variable complementarity determining regions3 (CDR3) sequence
QQRSNWPP

SEQ ID NO: 93 - DNA, 318 bp, Artificial Sequence
  Humanized E6 light chain variable region sequence
gaaattgtgttgacacagtctccagccaccctgtctttgtctccaggggaaagagccaccctcacctgcagcgccaccagcagtgttagctacatccactggtaccaacagaggcctggccagagccccaggctcctcatctatagcacctccaacctggccagcggcatcccagccaggttcagtggcagtgggtctgggagcgactacactctcaccatcagcagcctagagcctgaagattttgcagtttattactgtcagcagcgtagcagctcccctttcacctttggcagcggcaccaaagtggaaattaaa

SEQ ID NO: 94 - protein, 106 aa, Artificial Sequence
  Humanized E6 light chain variable region sequence
EIVLTQSPATLSLSPGERATLTCSATSSVSYIHWYQQRPGQSPRLLIYSTSNLASGIPARFSGSGSGSDYTLTISSLEPEDFAVYYCQQRSSSPFTFGSGTKVEIK

SEQ ID NO: 95 - DNA, 69 bp, Artificial Sequence
  Humanized E6 light chain variable framework region 1 (FWR1) acid sequence
gaaattgtgttgacacagtctccagccaccctgtctttgtctccaggggaaagagccaccctcacctgc

SEQ ID NO: 96 - protein, 23 aa, Artificial Sequence
  Humanized E6 light chain variable framework region 1 (FWR1) acid sequence
EIVLTQSPATLSLSPGERATLTC

SEQ ID NO: 97 - DNA, 30 bp, Artificial Sequence
  Humanized E6 light chain variable complementarity determining regions 1 (CDR1) sequence
agcgccaccagcagtgttagctacatccac

SEQ ID NO: 98 - protein, 10 aa, Artificial Sequence
  Humanized E6 light chain variable complementarity determining regions 1 (CDR1) sequence
SATSSVSYIH

SEQ ID NO: 99 - DNA, 45 bp, Artificial Sequence
  Humanized E6 heavy light variable framework region 2 (FWR2) acid sequence
tggtaccaacagaggcctggccagagccccaggctcctcatctat

SEQ ID NO: 100 - protein, 15 aa, Artificial Sequence
  Humanized E6 heavy light variable framework region 2 (FWR2) acid sequence
WYQQRPGQSPRLLIY

SEQ ID NO: 101 - DNA, 21 bp, Artificial Sequence
  Humanized E6 light chain variable complementarity determining regions 2 (CDR2) sequence
agcacctccaacctggccagc

SEQ ID NO: 102 - protein, 7 aa, Artificial Sequence
  Humanized E6 light chain variable complementarity determining regions 2 (CDR2) sequence
STSNLAS

SEQ ID NO: 103 - DNA, 96 bp, Artificial Sequence
  Humanized E6 light chain variable framework region 3 (FWR3) acid sequence
ggcatcccagccaggttcagtggcagtgggtctgggagcgactacactctcaccatcagcagcctagagcctgaagattttgcagtttattactgt

SEQ ID NO: 104 - protein, 32 aa, Artificial Sequence
  Humanized E6 light chain variable framework region 3 (FWR3) acid sequence
GIPARFSGSGSGSDYTLTISSLEPEDFAVYYC

SEQ ID NO: 105 - DNA, 27 bp, Artificial Sequence
  Humanized E6 light chain variable complementarity determining regions 3 (CDR3) sequence
cagcagcgtagcagctcccctttcacc

SEQ ID NO: 106 - protein, 9 aa, Artificial Sequence
  Humanized E6 light chain variable complementarity determining regions 3 (CDR3) sequence
QQRSSSPFT

SEQ ID NO: 107 - DNA, 740 bp, Artificial Sequence
  Humanized E6 Kappa light chain synthesized by Genescript
gaattctaagcttgggccaccatggaagccccagcgcagcttctcttcctcctgctactctggctcccagataccactggagaaattgtgttgacacagtctccagccaccctgtctttgtctccaggggaaagagccaccctcacctgcagcgccaccagcagtgttagctacatccactggtaccaacagaggcctggccagagccccaggctcctcatctatagcacctccaacctggccagcggcatcccagccaggttcagtggcagtgggtctgggagcgactacactctcaccatcagcagcctagagcctgaagattttgcagtttattactgtcagcagcgtagcagctcccctttcacctttggcagcggcaccaaagtggaaattaaaaggacggtggctgcaccatctgtcttcatcttcccgccatctgatgagcagttgaaatctggaactgcctctgttgtgtgcctgctgaataacttctatcccagagaggccaaagtacagtggaaggtggataacgccctccaatcgggtaactcccaggagagtgtcacagagcaggacagcaaggacagcacctacagcctcagcagcaccctgacgctgagcaaagcagactacgagaaacacaaagtctacgcctgcgaagtcacccatcagggcctgagctcgcccgtcacaaagagcttcaacaggggagagtgttagtaagtttaaactctaga

SEQ ID NO: 108 - protein, 243 aa, Artificial Sequence
  Humanized E6 Kappa light chain synthesized by Genescript
  misc_feature (243)..(243): Xaa can be any naturally occurring amino acid
EFAWATMEAPAQLLFLLLLWLPDTTGEIVLTQSPATLSLSPGERATLTCSATSSVSYIHWYQQRPGQSPRLLIYSTSNLASGIPARFSGSGSGSDYTLTISSLEPEDFAVYYCQQRSSSPFTFGSGTKVEIKRTVAAPSVFIFPPSDEQLKSGTASVVCLLNNFYPREAKVQWKVDNALQSGNSQESVTEQDSKDSTYSLSSTLTLSKADYEKHKVYACEVTHQGLSSPVTKSFNRGECVTLX

SEQ ID NO: 109 - DNA, 324 bp, Artificial Sequence
  Human Kappa light chain constant region sequence
aggacggtggctgcaccatctgtcttcatcttcccgccatctgatgagcagttgaaatctggaactgcctctgttgtgtgcctgctgaataacttctatcccagagaggccaaagtacagtggaaggtggataacgccctccaatcgggtaactcccaggagagtgtcacagagcaggacagcaaggacagcacctacagcctcagcagcaccctgacgctgagcaaagcagactacgagaaacacaaagtctacgcctgcgaagtcacccatcagggcctgagctcgcccgtcacaaagagcttcaacaggggagagtgttag

SEQ ID NO: 110 - protein, 107 aa, Artificial Sequence [sequence omitted]

SEQ ID NO: 111 - DNA, 642 bp, Artificial Sequence
  Humanized E6 lambda light chain sequence
gaaattgtgttgacacagtctccagccaccctgtctttgtctccaggggaaagagccaccctcacctgcagcgccaccagcagtgttagctacatccactggtaccaacagaggcctggccagagccccaggctcctcatctatagcacctccaacctggccagcggcatcccagccaggttcagtggcagtgggtctgggagcgactacactctcaccatcagcagcctagagcctgaagattttgcagtttattactgtcagcagcgtagcagctcccctttcacctttggcagcggcaccaaagtggaaattaaaggtcagcccaaggctgccccctcggtcactctgttcccgccctcctctgaggagcttcaagccaacaaggccacactggtgtgtctcataagtgacttctacccgggagccgtgacagtggcctggaaggcagatagcagccccgtcaaggcgggagtggagaccaccacaccctccaaacaaagcaacaacaagtacgcggccagcagctatctgagcctgacgcctgagcagtggaagtcccacagaagctacagctgccaggtcacgcatgaagggagcaccgtggagaagacagtggcccctacagaatgttcatagtaa

SEQ ID NO: 112 - protein, 212 aa, Artificial Sequence
  Humanized E6 lambda light chain sequence
EIVLTQSPATLSLSPGERATLTCSATSSVSYIHWYQQRPGQSPRLLIYSTSNLASGIPARFSGSGSGSDYTLTISSLEPEDFAVYYCQQRSSSPFTFGSGTKVEIKGQPKAAPSVTLFPPSSEELQANKATLVCLISDFYPGAVTVAWKADSSPVKAGVETTTPSKQSNNKYAASSYLSLTPEQWKSHRSYSCQVTHEGSTVEKTVAPTECS

SEQ ID NO: 113 - DNA, 324 bp, Artificial Sequence
  Humanized lambda light chain constant region sequence
ggtcagcccaaggctgccccctcggtcactctgttcccgccctcctctgaggagcttcaagccaacaaggccacactggtgtgtctcataagtgacttctacccgggagccgtgacagtggcctggaaggcagatagcagccccgtcaaggcgggagtggagaccaccacaccctccaaacaaagcaacaacaagtacgcggccagcagctatctgagcctgacgcctgagcagtggaagtcccacagaagctacagctgccaggtcacgcatgaagggagcaccgtggagaagacagtggcccctacagaatgttcatagtaa

SEQ ID NO: 114 - protein, 106 aa, Artificial Sequence
  Humanized lambda light chain constant region sequence
GQPKAAPSVTLFPPSSEELQANKATLVCLISDFYPGAVTVAWKADSSPVKAGVETTTPSKQSNNKYAASSYLSLTPEQWKSHRSYSCQVTHEGSTVEKTVAPTECS

SEQ ID NO: 115 - DNA, 614 bp, Artificial Sequence
  Human lambda light chain constant region gBLOCK#3 sequence
agcgccaccagcagtgttagctacatccactggtaccaacagaggcctggccagagccccaggctcctcatctatagcacctccaacctggccagcggcatcccagccaggttcagtggcagtgggtctgggagcgactacactctcaccatcagcagcctagagcctgaagattttgcagtttattactgtcagcagcgtagcagctcccctttcacctttggcagcggcaccaaagtggaaattaaaggtcagcccaaggctgccccctcggtcactctgttcccgccctcctctgaggagcttcaagccaacaaggccacactggtgtgtctcataagtgacttctacccgggagccgtgacagtggcctggaaggcagatagcagccccgtcaaggcgggagtggagaccaccacaccctccaaacaaagcaacaacaagtacgcggccagcagctatctgagcctgacgcctgagcagtggaagtcccacagaagctacagctgccaggtcacgcatgaagggagcaccgtggagaagacagtggcccctacagaatgttcatagtaagtttaaacccgctgatcagcctcgactgtgccttctagttg

SEQ ID NO: 116 - DNA, 31 bp, Artificial Sequence
  E6 light chain variable region overlapping sequence
agcgccaccagcagtgttagctacatccact

SEQ ID NO: 117 - DNA, 33 bp, Artificial Sequence; identical to SEQ ID NO: 64
  pCDNA3.1 V5 and pSECTag2 overlapping sequence

SEQ ID NO: 118 - DNA, 390 bp, Artificial Sequence
  Mouse C2 heavy chain variable region sequence
gaggtccagctggaggagtcagggggaggcttagtgaagcctggagggtccctgaaactctcctgtgcagcctctggattcactttcagtggctatgccatgtcttgggttcgccagactccggagaagaggctggagtgggtcgcaaccattagtagtggtggtacttatatctactatccagacagtgtgaaggggcgattcaccatctccagagacaatgccaagaacaccctgtacctgcaaatgagcagtctgaggtctgaggacacggccatgtattactgtgcaagacttgggggggataattactacgaatacttcgatgtctggggcgcagggaccacggtcaccgtctcctccgccaaaacgacacccccatctgtctat

SEQ ID NO: 119 - protein, 130 aa, Artificial Sequence
  Mouse C2 heavy chain variable region sequence
EVQLEESGGGLVKPGGSLKLSCAASGFTFSGYAMSWVRQTPEKRLEWVATISSGGTYIYYPDSVKGRFTISRDNAKNTLYLQMSSLRSEDTAMYYCARLGGDNYYEYFDVWGAGTTVTVSSAKTTPPSVY

SEQ ID NO: 120 - DNA, 90 bp, Artificial Sequence
  Mouse C2 heavy chain variable framework region 1 (FWR1) sequence
gaggtccagctggaggagtcagggggaggcttagtgaagcctggagggtccctgaaactctcctgtgcagcctctggattcactttcagt

SEQ ID NO: 121 - protein, 30 aa, Artificial Sequence
  Mouse C2 heavy chain variable framework region 1 (FWR1) sequence
EVQLEESGGGLVKPGGSLKLSCAASGFTFS

SEQ ID NO: 122 - DNA, 15 bp, Artificial Sequence
  Mouse C2 heavy chain variable complementarity determining regions 1 (CDR1) sequence
ggctatgccatgtct

SEQ ID NO: 123 - protein, 5 aa, Artificial Sequence
  Mouse C2 heavy chain variable complementarity determining regions 1 (CDR1) sequence
GYAMS

SEQ ID NO: 124 - DNA, 42 bp, Artificial Sequence
  Mouse C2 heavy chain variable framework region 2 (FWR2) sequence
tgggttcgccagactccggagaagaggctggagtgggtcgca

SEQ ID NO: 125 - protein, 14 aa, Artificial Sequence
  Mouse C2 heavy chain variable framework region 2 (FWR2) sequence
WVRQTPEKRLEWVA

SEQ ID NO: 126 - DNA, 51 bp, Artificial Sequence
  Mouse C2 heavy chain variable complementarity determining regions 2 (CDR2) sequence
accattagtagtggtggtacttatatctactatccagacagtgtgaagggg

SEQ ID NO: 127 - protein, 17 aa, Artificial Sequence
  Mouse C2 heavy chain variable complementarity determining regions 2 (CDR2) sequence
TISSGGTYIYYPDSVKG

SEQ ID NO: 128 - DNA, 96 bp, Artificial Sequence
  Mouse C2 heavy chain variable framework region 3 (FWR3) sequence
cgattcaccatctccagagacaatgccaagaacaccctgtacctgcaaatgagcagtctgaggtctgaggacacggccatgtattactgtgcaaga

SEQ ID NO: 129 - protein, 32 aa, Artificial Sequence
  Mouse C2 heavy chain variable framework region 3 (FWR3) sequence
RFTISRDNAKNTLYLQMSSLRSEDTAMYYCAR

SEQ ID NO: 130 - DNA, 36 bp, Artificial Sequence
  Mouse C2 heavy chain variable complementarity determining regions 3 (CDR3) sequence
cttgggggggataattactacgaatacttcgatgtc

SEQ ID NO: 131 - protein, 12 aa, Artificial Sequence
  Mouse C2 heavy chain variable complementarity determining regions 3 (CDR3) sequence
LGGDNYYEYFDV

SEQ ID NO: 132 - DNA, 294 bp, Artificial Sequence
  IGHV3-21*04 heavy chain variable region sequence
gaggtgcagctggtggagtctgggggaggcctggtcaagcctggggggtccctgagactctcctgtgcagcctctggattcaccttcagtagctatagcatgaactgggtccgccaggctccagggaaggggctggagtgggtctcatccattagtagtagtagtagttacatatactacgcagactcagtgaagggccgattcaccatctccagagacaacgccaagaactcactgtatctgcaaatgaacagcctgagagccgaggacacggccgtgtattactgtgcgaga

SEQ ID NO: 133 - protein, 98 aa, Artificial Sequence; identical to SEQ ID NO: 27
  IGHV3-21*04 heavy chain variable region sequence

SEQ ID NO: 134 - DNA, 90 bp, Artificial Sequence; identical to SEQ ID NO: 28
  IGHV3-21*04 heavy chain variable framework region 1 (FWR1) sequence

SEQ ID NO: 135 - protein, 30 aa, Artificial Sequence; identical to SEQ ID NO: 29
  IGHV3-21*04 heavy chain variable framework region 1 (FWR1) sequence

SEQ ID NO: 136 - DNA, 15 bp, Artificial Sequence
  IGHV3-21*04 heavy chain variable complementarity determining regions 1 (CDR1) sequence
agctatagcatgaac

SEQ ID NO: 137 - protein, 5 aa, Artificial Sequence
  IGHV3-21*04 heavy chain variable complementarity determining regions 1 (CDR1) sequence
SYSMN

SEQ ID NO: 138 - DNA, 41 bp, Artificial Sequence
  IGHV3-21*04 heavy chain variable framework region 2 (FWR2) sequence
gggtccgccaggctccagggaaggggctggagtgggtctca

SEQ ID NO: 139 - protein, 14 aa, Artificial Sequence
  IGHV3-21*04 heavy chain variable framework region 2 (FWR2) sequence
WVRQAPGKGLEWVS

SEQ ID NO: 140 - DNA, 51 bp, Artificial Sequence; identical to SEQ ID NO: 34
  IGHV3-21*04 heavy chain variable complementarity determining regions 2 (CDR2) sequence

SEQ ID NO: 141 - protein, 17 aa, Artificial Sequence
  IGHV3-21*04 heavy chain variable complementarity determining regions 2 (CDR2) sequence
SISSSSSYIYYADSVKG

SEQ ID NO: 142 - DNA, 96 bp, Artificial Sequence
  IGHV3-21*04 heavy chain variable framework region 3 (FWR3) sequence
cgattcaccatctccagagacaacgccaagaactcactgtatctgcaaatgaacagcctgagagccgaggacacggccgtgtattactgtgcgaga

SEQ ID NO: 143 - protein, 32 aa, Artificial Sequence; identical to SEQ ID NO: 37
  IGHV3-21*04 heavy chain variable framework region 3 (FWR3) sequence

SEQ ID NO: 144 - DNA, 363 bp, Artificial Sequence
  Humanized C2 heavy chain variable region sequence
gaggtgcagctggtggagtctgggggaggcctggtcaagcctggggggtccctgagactctcctgtgcagcctctggattcaccttcagtggctatgccatgagctgggtccgccaggctccagggaaggggctggagtgggtctcaaccattagtagtggcggaacctacatatactaccccgactcagtgaagggccgattcaccatctccagagacaacgccaagaactcactgtatctgcaaatgaacagcctgagagccgaggacacggccgtgtattactgtgcgagacttgggggggataattactacgaatacttcgatgtctggggcaaagggaccacggtcaccgtctcctcc

SEQ ID NO: 145 - protein, 121 aa, Artificial Sequence
  Humanized C2 heavy chain variable region sequence
EVQLVESGGGLVKPGGSLRLSCAASGFTFSGYAMSWVRQAPGKGLEWVSTISSGGTYIYYPDSVKGRFTISRDNAKNSLYLQMNSLRAEDTAVYYCARLGGDNYYEYFDVWGKGTTVTVSS

SEQ ID NO: 146 - DNA, 90 bp, Artificial Sequence; identical to SEQ ID NO: 28
  Humanized C2 heavy chain variable framework region 1 (FWR1) sequence

SEQ ID NO: 147 - protein, 30 aa, Artificial Sequence; identical to SEQ ID NO: 29
  Humanized C2 heavy chain variable framework region 1 (FWR1) sequence

SEQ ID NO: 148 - DNA, 15 bp, Artificial Sequence
  Humanized C2 heavy chain variable complementarity determining regions 1 (CDR1) sequence
ggctatgccatgagc

SEQ ID NO: 149 - protein, 5 aa, Artificial Sequence
  Humanized C2 heavy chain variable complementarity determining regions 1 (CDR1) sequence
GYAMS

SEQ ID NO: 150 - DNA, 43 bp, Artificial Sequence
  Humanized C2 heavy chain variable framework region 2 (FWR2) sequence
tgggtccgccaggctccagggaaggggctggagtgggtctcaa

SEQ ID NO: 151 - protein, 14 aa, Artificial Sequence
  Humanized C2 heavy chain variable framework region 2 (FWR2) sequence
WVRQAPGKGLEWVS

SEQ ID NO: 152 - DNA, 51 bp, Artificial Sequence
  Humanized C2 heavy chain variable complementarity determining regions 2 (CDR2) sequence
accattagtagtggcggaacctacatatactaccccgactcagtgaagggc

SEQ ID NO: 153 - protein, 17 aa, Artificial Sequence
  Humanized C2 heavy chain variable complementarity determining regions 2 (CDR2) sequence
TISSGGTYIYYPDSVKG

SEQ ID NO: 154 - DNA, 96 bp, Artificial Sequence; identical to SEQ ID NO: 142
  Humanized C2 heavy chain variable framework region 3 (FWR3) sequence

SEQ ID NO: 155 - protein, 32 aa, Artificial Sequence; identical to SEQ ID NO: 37
  Humanized C2 heavy chain variable framework region 3 (FWR3) sequence

SEQ ID NO: 156 - DNA, 36 bp, Artificial Sequence; identical to SEQ ID NO: 130
  Humanized C2 heavy chain variable complementarity determining regions 3 (CDR3) sequence

SEQ ID NO: 157 - protein, 12 aa, Artificial Sequence
  Humanized C2 heavy chain variable complementarity determining regions 3 (CDR3) sequence
LGGDNYYEYFDV

SEQ ID NO: 158 - DNA, 1359 bp, Artificial Sequence
  Humanized C2 IgG1 heavy chain sequence
gaggtgcagctggtggagtctgggggaggcctggtcaagcctggggggtccctgagactctcctgtgcagcctctggattcaccttcagtggctatgccatgagctgggtccgccaggctccagggaaggggctggagtgggtctcaaccattagtagtggcggaacctacatatactaccccgactcagtgaagggccgattcaccatctccagagacaacgccaagaactcactgtatctgcaaatgaacagcctgagagccgaggacacggccgtgtattactgtgcgagacttgggggggataattactacgaatacttcgatgtctggggcaaagggaccacggtcaccgtctcctccgctagcaccaagggcccatcggtcttccccctggcaccctcctccaagagcacctctgggggcacagcggccctgggctgcctggtcaaggactacttccccgaaccggtgacggtgtcgtggaactcaggcgccctgaccagcggcgtgcacaccttcccggctgtcctacagtcctcaggactctactccctcagcagcgtggtgacagtgccctccagcagcttgggcacccagacctacatctgcaacgtgaatcacaagcccagcaacaccaaggtggacaagaaagttgagcccaaatcttgtgacaaaactcacacatgcccaccgtgcccagcacctgaactcctggggggaccgtcagtcttcctcttccccccaaaacccaaggacaccctcatgatctcccggacccctgaggtcacatgcgtggtggtggacgtgagccacgaagaccctgaggtcaagttcaactggtacgtggacggcgtggaggtgcataatgccaagacaaagccgcgggaggagcagtacaacagcacgtaccgtgtggtcagcgtcctcaccgtcctgcaccaggactggctgaatggcaaggagtacaagtgcaaggtctccaacaaagccctcccagcccccatcgagaaaaccatctccaaagccaaagggcagccccgagaaccacaggtgtacaccctgcccccatcccgggaggagatgaccaagaaccaggtcagcctgacctgcctggtcaaaggcttctatcccagcgacatcgccgtggagtgggagagcaatgggcagccggagaacaactacaagaccacgcctcccgtgctggactccgacggctccttcttcctctacagcaagctcaccgtggacaagagcaggtggcagcaggggaacgtcttctcatgctccgtgatgcatgaggctctgcacaaccactacacgcagaagagcctctccctgtctccgggtaaatgataa

SEQ ID NO: 159 - protein, 451 aa, Artificial Sequence
  Humanized C2 IgG1 heavy chain sequence
EVQLVESGGGLVKPGGSLRLSCAASGFTFSGYAMSWVRQAPGKGLEWVSTISSGGTYIYYPDSVKGRFTISRDNAKNSLYLQMNSLRAEDTAVYYCARLGGDNYYEYFDVWGKGTTVTVSSASTKGPSVFPLAPSSKSTSGGTAALGCLVKDYFPEPVTVSWNSGALTSGVHTFPAVLQSSGLYSLSSVVTVPSSSLGTQTYICNVNHKPSNTKVDKKVEPKSCDKTHTCPPCPAPELLGGPSVFLFPPKPKDTLMISRTPEVTCVVVDVSHEDPEVKFNWYVDGVEVHNAKTKPREEQYNSTYRVVSVLTVLHQDWLNGKEYKCKVSNKALPAPIEKTISKAKGQPREPQVYTLPPSREEMTKNQVSLTCLVKGFYPSDIAVEWESNGQPENNYKTTPPVLDSDGSFFLYSKLTVDKSRWQQGNVFSCSVMHEALHNHYTQKSLSLSPGK

SEQ ID NO: 160 - DNA, 616 bp, Artificial Sequence
  Humanized C2 gBLOCK#4 sequence
actcactatagggagacccaagctggctagttaagcttgggccaccatggagacagacacactcctgctatgggtactgctgctctgggttccaggttccactggtgacgaggtgcagctggtggagtctgggggaggcctggtcaagcctggggggtccctgagactctcctgtgcagcctctggattcaccttcagtggctatgccatgagctgggtccgccaggctccagggaaggggctggagtgggtctcaaccattagtagtggcggaacctacatatactaccccgactcagtgaagggccgattcaccatctccagagacaacgccaagaactcactgtatctgcaaatgaacagcctgagagccgaggacacggccgtgtattactgtgcgagacttgggggggataattactacgaatacttcgatgtctggggcaaagggaccacggtcaccgtctcctccgctagcaccaagggcccatcggtcttccccctggcaccctcctccaagagcacctctgggggcacagcggccctgggctgcctggtcaaggactacttccccgaaccggtgacggtgtcgtggaactcaggcgccctgaccagc

SEQ ID NO: 161 - DNA, 32 bp, Artificial Sequence
  pCDNA3.1 V5 overlapping sequence
actcactatagggagacccaagctggctagtt

SEQ ID NO: 162 - DNA, 34 bp, Artificial Sequence
  Human IgG1 constant region overlapping sequence
gacggtgtcgtggaactcaggcgccctgaccagc

SEQ ID NO: 163 - DNA, 1347 bp, Artificial Sequence
  Humanized C2 IgG2 heavy chain sequence
gaggtgcagctggtggagtctgggggaggcctggtcaagcctggggggtccctgagactctcctgtgcagcctctggattcaccttcagtggctatgccatgagctgggtccgccaggctccagggaaggggctggagtgggtctcaaccattagtagtggcggaacctacatatactaccccgactcagtgaagggccgattcaccatctccagagacaacgccaagaactcactgtatctgcaaatgaacagcctgagagccgaggacacggccgtgtattactgtgcgagacttgggggggataattactacgaatacttcgatgtctggggcaaagggaccacggtcaccgtctcctccgcctccaccaagggcccatcggtcttccccctggcgccctgctccaggagcacctccgagagcacagccgccctgggctgcctggtcaaggactacttccccgaaccggtgacggtgtcgtggaactcaggcgctctgaccagcggcgtgcacaccttcccagctgtcctacagtcctcaggactctactccctcagcagcgtggtgaccgtgccctccagcaacttcggcacccagacctacacctgcaacgtagatcacaagcccagcaacaccaaggtggacaagacagttgagcgcaaatgttgtgtcgagtgcccaccgtgcccagcaccacctgtggcaggaccgtcagtcttcctcttccccccaaaacccaaggacaccctcatgatctcccggacccctgaggtcacgtgcgtggtggtggacgtgagccacgaagaccccgaggtccagttcaactggtacgtggacggcgtggaggtgcataatgccaagacaaagccacgggaggagcagttcaacagcacgttccgtgtggtcagcgtcctcaccgttgtgcaccaggactggctgaacggcaaggagtacaagtgcaaggtctccaacaaaggcctcccagcccccatcgagaaaaccatctccaaaaccaaagggcagccccgagaaccacaggtgtacaccctgcccccatcccgggaggagatgaccaagaaccaggtcagcctgacctgcctggtcaaaggcttctaccccagcgacatcgccgtggagtgggagagcaatgggcagccggagaacaactacaagaccacacctcccatgctggactccgacggctccttcttcctctacagcaagctcaccgtggacaagagcaggtggcagcaggggaacgtcttctcatgctccgtgatgcatgaggctctgcacaaccactacacgcagaagagcctctccctgtctccgggtaaatagtaa

SEQ ID NO: 164 - protein, 447 aa, Artificial Sequence
  Humanized C2 IgG2 heavy chain sequence
EVQLVESGGGLVKPGGSLRLSCAASGFTFSGYAMSWVRQAPGKGLEWVSTISSGGTYIYYPDSVKGRFTISRDNAKNSLYLQMNSLRAEDTAVYYCARLGGDNYYEYFDVWGKGTTVTVSSASTKGPSVFPLAPCSRSTSESTAALGCLVKDYFPEPVTVSWNSGALTSGVHTFPAVLQSSGLYSLSSVVTVPSSNFGTQTYTCNVDHKPSNTKVDKTVERKCCVECPPCPAPPVAGPSVFLFPPKPKDTLMISRTPEVTCVVVDVSHEDPEVQFNWYVDGVEVHNAKTKPREEQFNSTFRVVSVLTVVHQDWLNGKEYKCKVSNKGLPAPIEKTISKTKGQPREPQVYTLPPSREEMTKNQVSLTCLVKGFYPSDIAVEWESNGQPENNYKTTPPMLDSDGSFFLYSKLTVDKSRWQQGNVFSCSVMHEALHNHYTQKSLSLSPGK

SEQ ID NO: 165 - DNA, 549 bp, Artificial Sequence
  Humanized C2 gBLOCK#5 sequence
tgctctgggttccaggttccactggtgacgcggcccagccggccgaggtgcagctggtggagtctgggggaggcctggtcaagcctggggggtccctgagactctcctgtgcagcctctggattcaccttcagtggctatgccatgagctgggtccgccaggctccagggaaggggctggagtgggtctcaaccattagtagtggcggaacctacatatactaccccgactcagtgaagggccgattcaccatctccagagacaacgccaagaactcactgtatctgcaaatgaacagcctgagagccgaggacacggccgtgtattactgtgcgagacttgggggggataattactacgaatacttcgatgtctggggcaaagggaccacggtcaccgtctcctccgcctccaccaagggcccatcggtcttccccctggcgccctgctccaggagcacctccgagagcacagccgccctgggctgcctggtcaaggactacttccccgaaccggtgacggtgtcgtggaactcaggcgctctgacca

SEQ ID NO: 166 - DNA, 31 bp, Artificial Sequence
  pSEC Tag2 overlapping sequence
tgctctgggttccaggttccactggtgacgc

SEQ ID NO: 167 - DNA, 32 bp, Artificial Sequence
  Human IgG2 constant region overlapping sequence
gacggtgtcgtggaactcaggcgctctgacca

SEQ ID NO: 168 - DNA, 360 bp, Artificial Sequence
  Mouse C2 light chain variable region sequence
gacattgtgatcacacagtctacagcttccttaggtgtatctctggggcagagggccaccatctcatgcagggccagcaaaagtgtcagtacatctggctatagttatatgcactggtaccaacagagaccaggacagccacccaaactcctcatctatcttgcatccaacctagaatctggggtccctgccaggttcagtggcagtgggtctgggacagacttcaccctcaacatccatcctgtggaggaggaggatgctgcaacctattactgtcagcacagtagggagcttccgttcacgttcggaggggggaccaagctggagataaaacgggctgatgctgcaccaactgtatcc

SEQ ID NO: 169 - protein, 120 aa, Artificial Sequence
  Mouse C2 light chain variable region sequence
DIVITQSTASLGVSLGQRATISCRASKSVSTSGYSYMHWYQQRPGQPPKLLIYLASNLESGVPARFSGSGSGTDFTLNIHPVEEEDAATYYCQHSRELPFTFGGGTKLEIKRADAAPTVS

SEQ ID NO: 170 - DNA, 69 bp, Artificial Sequence
  Mouse C2 light chain variable framework region 1 (FWR1) sequence
gacattgtgatcacacagtctacagcttccttaggtgtatctctggggcagagggccaccatctcatgc

SEQ ID NO: 171 - protein, 23 aa, Artificial Sequence
  Mouse C2 light chain variable framework region 1 (FWR1) sequence
DIVITQSTASLGVSLGQRATISC

SEQ ID NO: 172 - DNA, 45 bp, Artificial Sequence
  Mouse C2 light chain variable complementarity determining regions 1 (CDR1) sequence
agggccagcaaaagtgtcagtacatctggctatagttatatgcac

SEQ ID NO: 173 - protein, 15 aa, Artificial Sequence
  Mouse C2 light chain variable complementarity determining regions 1 (CDR1) sequence
RASKSVSTSGYSYMH

SEQ ID NO: 174 - DNA, 45 bp, Artificial Sequence
  Mouse C2 light chain variable framework region 2 (FWR2) sequence
tggtaccaacagagaccaggacagccacccaaactcctcatctat

SEQ ID NO: 175 - protein, 15 aa, Artificial Sequence
  Mouse C2 light chain variable framework region 2 (FWR2) sequence
WYQQRPGQPPKLLIY

SEQ ID NO: 176 - DNA, 20 bp, Artificial Sequence
  Mouse C2 light chain variable complementarity determining regions 2 (CDR2) sequence
cttgcatccaacctagaatc

SEQ ID NO: 177 - protein, 7 aa, Artificial Sequence
  Mouse C2 light chain variable complementarity determining regions 2 (CDR2) sequence
LASNLES

SEQ ID NO: 178 - DNA, 97 bp, Artificial Sequence
  Mouse C2 light chain variable framework region 3 (FWR3) sequence
tggggtccctgccaggttcagtggcagtgggtctgggacagacttcaccctcaacatccatcctgtggaggaggaggatgctgcaacctattactgt

SEQ ID NO: 179 - protein, 32 aa, Artificial Sequence
  Mouse C2 light chain variable framework region 3 (FWR3) sequence
GVPARFSGSGSGTDFTLNIHPVEEEDAATYYC

SEQ ID NO: 180 - DNA, 27 bp, Artificial Sequence
  Mouse C2 light chain variable complementarity determining regions 3 (CDR3) sequence
cagcacagtagggagcttccgttcacg

SEQ ID NO: 181 - protein, 9 aa, Artificial Sequence
  Mouse C2 light chain variable complementarity determining regions 3 (CDR3) sequence
QHSRELPFT

SEQ ID NO: 182 - DNA, 303 bp, Artificial Sequence
  IGKV7-3*01 light chain variable region sequence
gacattgtgctgacccagtctccagcctccttggccgtgtctccaggacagagggccaccatcacctgcagagccagtgagagtgtcagtttcttgggaataaacttaattcactggtatcagcagaaaccaggacaacctcctaaactcctgatttaccaagcatccaataaagacactggggtcccagccaggttcagcggcagtgggtctgggaccgatttcaccctcacaattaatcctgtggaagctaatgatactgcaaattattactgtctgcagagtaagaattttcctcccaca

SEQ ID NO: 183 - protein, 101 aa, Artificial Sequence
  IGKV7-3*01 light chain variable region sequence
DIVLTQSPASLAVSPGQRATITCRASESVSFLGINLIHWYQQKPGQPPKLLIYQASNKDTGVPARFSGSGSGTDFTLTINPVEANDTANYYCLQSKNFPPT

SEQ ID NO: 184 - DNA, 69 bp, Artificial Sequence
  IGKV7-3*01 light chain variable framework region 1 (FWR1) sequence
gacattgtgctgacccagtctccagcctccttggccgtgtctccaggacagagggccaccatcacctgc

SEQ ID NO: 185 - protein, 23 aa, Artificial Sequence
  IGKV7-3*01 light chain variable framework region 1 (FWR1) sequence
DIVLTQSPASLAVSPGQRATITC

SEQ ID NO: 186 - DNA, 45 bp, Artificial Sequence
  IGKV7-3*01 light chain variable complementarity determining regions 1 (CDR1) sequence
agagccagtgagagtgtcagtttcttgggaataaacttaattcac

SEQ ID NO: 187 - protein, 15 aa, Artificial Sequence
  IGKV7-3*01 light chain variable complementarity determining regions 1 (CDR1) sequence
RASESVSFLGINLIH

SEQ ID NO: 188 - DNA, 45 bp, Artificial Sequence
  IGKV7-3*01 light chain variable framework region 2 (FWR2) sequence
tggtatcagcagaaaccaggacaacctcctaaactcctgatttac

SEQ ID NO: 189 - protein, 15 aa, Artificial Sequence
  IGKV7-3*01 light chain variable framework region 2 (FWR2) sequence
WYQQKPGQPPKLLIY

SEQ ID NO: 190 - DNA, 21 bp, Artificial Sequence
  IGKV7-3*01 light chain variable complementarity determining regions 2 (CDR2) sequence
caagcatccaataaagacact

SEQ ID NO: 191 - protein, 7 aa, Artificial Sequence
  IGKV7-3*01 light chain variable complementarity determining regions 2 (CDR2) sequence
QASNKDT

SEQ ID NO: 192 - DNA, 96 bp, Artificial Sequence
  IGKV7-3*01 light chain variable framework region 3 (FWR3) sequence
ggggtcccagccaggttcagcggcagtgggtctgggaccgatttcaccctcacaattaatcctgtggaagctaatgatactgcaaattattactgt

SEQ ID NO: 193 - protein, 32 aa, Artificial Sequence
  IGKV7-3*01 light chain variable framework region 3 (FWR3) sequence
GVPARFSGSGSGTDFTLTINPVEANDTANYYC

SEQ ID NO: 194 - DNA, 339 bp, Artificial Sequence
  Humanized C2 light chain variable region sequence
gacattgtgctgacccagtctccagcctccttggccgtgtctccaggacagagggccaccatcacctgcagagccagtaagagtgtcagtaccagcggatactcctacatgcactggtatcagcagaaaccaggacaacctcctaaactcctgatttacctggcatccaatctggagagcggggtcccagccaggttcagcggcagtgggtctgggaccgatttcaccctcacaattaatcctgtggaagctaatgatactgcaaattattactgtcagcacagtagggagctgcctttcacattcggcggagggaccaaggtggagatcaaacgaact

SEQ ID NO: 195 - protein, 113 aa, Artificial Sequence
  Humanized C2 light chain variable region sequence
DIVLTQSPASLAVSPGQRATITCRASKSVSTSGYSYMHWYQQKPGQPPKLLIYLASNLESGVPARFSGSGSGTDFTLTINPVEANDTANYYCQHSRELPFTFGGGTKVEIKRT

SEQ ID NO: 196 - DNA, 69 bp, Artificial Sequence; identical to SEQ ID NO: 184
  Humanized C2 light chain variable framework region 1 (FWR1) acid sequence

SEQ ID NO: 197 - protein, 23 aa, Artificial Sequence
  Humanized C2 light chain variable framework region 1 (FWR1) acid sequence
DIVLTQSPASLAVSPGQRATITC

SEQ ID NO: 198 - DNA, 45 bp, Artificial Sequence
  Humanized C2 light chain variable complementarity determining regions 1 (CDR1) sequence
agagccagtaagagtgtcagtaccagcggatactcctacatgcac

SEQ ID NO: 199 - protein, 15 aa, Artificial Sequence
  Humanized C2 light chain variable complementarity determining regions 1 (CDR1) sequence
RASKSVSTSGYSYMH

SEQ ID NO: 200 - DNA, 45 bp, Artificial Sequence; identical to SEQ ID NO: 188
  Humanized C2 heavy light variable framework region 2 (FWR2) acid sequence

SEQ ID NO: 201 - protein, 15 aa, Artificial Sequence
  Humanized C2 heavy light variable framework region 2 (FWR2) acid sequence
WYQQKPGQPPKLLIY

SEQ ID NO: 202 - DNA, 21 bp, Artificial Sequence
  Humanized C2 light chain variable complementarity determining regions 2 (CDR2) sequence
ctggcatccaatctggagagc

SEQ ID NO: 203 - protein, 7 aa, Artificial Sequence
  Humanized C2 light chain variable complementarity determining regions 2 (CDR2) sequence
LASNLES

SEQ ID NO: 204 - DNA, 96 bp, Artificial Sequence; identical to SEQ ID NO: 192
  Humanized C2 light chain variable framework region 3 (FWR3) acid sequence

SEQ ID NO: 205 - protein, 32 aa, Artificial Sequence; identical to SEQ ID NO: 193
  Humanized C2 light chain variable framework region 3 (FWR3) acid sequence

SEQ ID NO: 206 - DNA, 27 bp, Artificial Sequence
  Humanized C2 light chain variable complementarity determining regions 3 (CDR3) sequence
cagcacagtagggagctgcctttcaca

SEQ ID NO: 207 - protein, 9 aa, Artificial Sequence
  Humanized C2 light chain variable complementarity determining regions 3 (CDR3) sequence
QHSRELPFT

SEQ ID NO: 208 - DNA, 27 bp, Artificial Sequence
  Humanized C2 light chain variable complementarity determining regions 3 (CDR3) sequence
ctgcagagtaagaattttcctcccaca

SEQ ID NO: 209 - protein, 9 aa, Artificial Sequence
  Humanized C2 light chain variable complementarity determining regions 3 (CDR3) sequence
LQSKNFPPT

SEQ ID NO: 210 - DNA, 813 bp, Artificial Sequence
  Humanized C2 gBLOCK#6 sequence (Kappa light chain in pCDNA3.1 V5)
actcactatagggagacccaagctggctagttaagcttgggccaccatggagacagacacactcctgctatgggtactgctgctctgggttccaggttccactggtgacgacattgtgctgacccagtctccagcctccttggccgtgtctccaggacagagggccaccatcacctgcagagccagtaagagtgtcagtaccagcggatactcctacatgcactggtatcagcagaaaccaggacaacctcctaaactcctgatttacctggcatccaatctggagagcggggtcccagccaggttcagcggcagtgggtctgggaccgatttcaccctcacaattaatcctgtggaagctaatgatactgcaaattattactgtcagcacagtagggagctgcctttcacattcggcggagggaccaaggtggagatcaaacgaactacggtggctgcaccatctgtcttcatcttcccgccatctgatgagcagttgaaatctggaactgcctctgttgtgtgcctgctgaataacttctatcccagagaggccaaagtacagtggaaggtggataacgccctccaatcgggtaactcccaggagagtgtcacagagcaggacagcaaggacagcacctacagcctcagcagcaccctgacgctgagcaaagcagactacgagaaacacaaagtctacgcctgcgaagtcacccatcagggcctgagctcgcccgtcacaaagagcttcaacaggggagagtgttagtaagtttaaacccgctgatcagcctcgactgtgccttctagttg

SEQ ID NO: 211 - DNA, 32 bp, Artificial Sequence; identical to SEQ ID NO: 161
  pCDNA3.1 V5 5' overlapping sequence

SEQ ID NO: 212 - DNA, 33 bp, Artificial Sequence; identical to SEQ ID NO: 64
  pCDNA3.1 V5 3' overlapping sequence

SEQ ID NO: 213 - DNA, 748 bp, Artificial Sequence
  Humanized C2 gBLOCK#7 sequence (Kappa light chain in pSEC Tag2)
tgctctgggttccaggttccactggtgacgcggcccagccggccgacattgtgctgacccagtctccagcctccttggccgtgtctccaggacagagggccaccatcacctgcagagccagtaagagtgtcagtaccagcggatactcctacatgcactggtatcagcagaaaccaggacaacctcctaaactcctgatttacctggcatccaatctggagagcggggtcccagccaggttcagcggcagtgggtctgggaccgatttcaccctcacaattaatcctgtggaagctaatgatactgcaaattattactgtcagcacagtagggagctgcctttcacattcggcggagggaccaaggtggagatcaaacgaactacggtggctgcaccatctgtcttcatcttcccgccatctgatgagcagttgaaatctggaactgcctctgttgtgtgcctgctgaataacttctatcccagagaggccaaagtacagtggaaggtggataacgccctccaatcgggtaactcccaggagagtgtcacagagcaggacagcaaggacagcacctacagcctcagcagcaccctgacgctgagcaaagcagactacgagaaacacaaagtctacgcctgcgaagtcacccatcagggcctgagctcgcccgtcacaaagagcttcaacaggggagagtgttagtaagtttaaacccgctgatcagcctcgactgtgccttctagttg

SEQ ID NO: 214 - DNA, 31 bp, Artificial Sequence; identical to SEQ ID NO: 166
  pSEC Tag2 5' overlapping sequence

SEQ ID NO: 215 - DNA, 33 bp, Artificial Sequence; identical to SEQ ID NO: 64
  pSEC Tag2 3' overlapping sequence

SEQ ID NO: 216 - DNA, 813 bp, Artificial Sequence
  Humanized C2 gBLOCK#8 sequence (lambda light chain in pCDNA3.1 V5)
actcactatagggagacccaagctggctagttaagcttgggccaccatggagacagacacactcctgctatgggtactgctgctctgggttccaggttccactggtgacgacattgtgctgacccagtctccagcctccttggccgtgtctccaggacagagggccaccatcacctgcagagccagtaagagtgtcagtaccagcggatactcctacatgcactggtatcagcagaaaccaggacaacctcctaaactcctgatttacctggcatccaatctggagagcggggtcccagccaggttcagcggcagtgggtctgggaccgatttcaccctcacaattaatcctgtggaagctaatgatactgcaaattattactgtcagcacagtagggagctgcctttcacattcggcggagggaccaaggtggagatcaaacgaactggtcagcccaaggctgccccctcggtcactctgttcccgccctcctctgaggagcttcaagccaacaaggccacactggtgtgtctcataagtgacttctacccgggagccgtgacagtggcctggaaggcagatagcagccccgtcaaggcgggagtggagaccaccacaccctccaaacaaagcaacaacaagtacgcggccagcagctatctgagcctgacgcctgagcagtggaagtcccacagaagctacagctgccaggtcacgcatgaagggagcaccgtggagaagacagtggcccctacagaatgttcatagtaagtttaaacccgctgatcagcctcgactgtgccttctagttg

SEQ ID NO: 217 - DNA, 32 bp, Artificial Sequence; identical to SEQ ID NO: 161
  pCDNA3.1 V5 5' overlapping sequence

SEQ ID NO: 218 - DNA, 33 bp, Artificial Sequence; identical to SEQ ID NO: 64
  pCDNA3.1 V5 3' overlapping sequence

SEQ ID NO: 219 - DNA, 748 bp, Artificial Sequence
  Humanized C2 gBLOCK#9 sequence (lambda light chain in pSEC Tag2)
tgctctgggttccaggttccactggtgacgcggcccagccggccgacattgtgctgacccagtctccagcctccttggccgtgtctccaggacagagggccaccatcacctgcagagccagtaagagtgtcagtaccagcggatactcctacatgcactggtatcagcagaaaccaggacaacctcctaaactcctgatttacctggcatccaatctggagagcggggtcccagccaggttcagcggcagtgggtctgggaccgatttcaccctcacaattaatcctgtggaagctaatgatactgcaaattattactgtcagcacagtagggagctgcctttcacattcggcggagggaccaaggtggagatcaaacgaactggtcagcccaaggctgccccctcggtcactctgttcccgccctcctctgaggagcttcaagccaacaaggccacactggtgtgtctcataagtgacttctacccgggagccgtgacagtggcctggaaggcagatagcagccccgtcaaggcgggagtggagaccaccacaccctccaaacaaagcaacaacaagtacgcggccagcagctatctgagcctgacgcctgagcagtggaagtcccacagaagctacagctgccaggtcacgcatgaagggagcaccgtggagaagacagtggcccctacagaatgttcatagtaagtttaaacccgctgatcagcctcgactgtgccttctagttg

SEQ ID NO: 220 - DNA, 31 bp, Artificial Sequence; identical to SEQ ID NO: 166
  pSEC Tag2 5' overlapping sequence

SEQ ID NO: 221 - DNA, 33 bp, Artificial Sequence; identical to SEQ ID NO: 64
  pSEC Tag2 3' overlapping sequence

SEQ ID NO: 222 - DNA, 63 bp, Artificial Sequence
  Murine Ig kappa chain leader sequence
atggagacagacacactcctgctatgggtactgctgctctgggttccaggttccactggtgac

SEQ ID NO: 223 - protein, 21 aa, Artificial Sequence
  Murine Ig kappa chain leader sequence
METDTLLLWVLLLWVPGSTGD

SEQ ID NO: 224 - DNA, 60 bp, Artificial Sequence
  Interleukin-2 (IL-2) leader sequence
atgtacaggatgcaactcctgtcttgcattgcactaagtcttgcacttgtcacaaacagt

SEQ ID NO: 225 - protein, 20 aa, Artificial Sequence
  Interleukin-2 (IL-2) leader sequence
MYRMQLLSCIALSLALVTNS

SEQ ID NO: 226 - DNA, 48 bp, Artificial Sequence
  CD33 leader sequence
atgcctcttctgcttctgcttcctctgctttgggctggagctcttgct

SEQ ID NO: 227 - protein, 16 aa, Artificial Sequence
  CD33 leader sequence
MPLLLLLPLLWAGALA

SEQ ID NO: 228 - DNA, 57 bp, Artificial Sequence
  IGHV3-21*03 leader sequence
atggaactggggctccgctgggttttccttgttgctattttagaaggtgtccagtgt

SEQ ID NO: 229 - protein, 19 aa, Artificial Sequence
  IGHV3-21*03 leader sequence
MELGLRWVFLVAILEGVQC

SEQ ID NO: 230 - DNA, 60 bp, Artificial Sequence
  IGHV3-11*02 leader sequence
atggaagccccagcgcagcttctcttcctcctgctactctggctcccagataccactgga

SEQ ID NO: 231 - protein, 20 aa, Artificial Sequence
  IGHV3-11*02 leader sequence
MEAPAQLLFLLLLWLPDTTG

SEQ ID NO: 232 - DNA, 729 bp, Artificial Sequence
  Humanized E6 single chain GS3
gaggtgcagctggtggagtctgggggaggcctggtcaagcctggggggtccctgagactctcctgtgcagcctctggattcaccttcagtaggtatggcatgagctgggtccgccaggctccagggaagaggctggagtgggtctcaaccattagtggcggaggcacctacatatactacccagactcagtgaagggccgattcaccatctccagagacaacgccaagaacaccctgtatctgcaaatgaacagcctgagagccgaggacacggctgtgtattactgtaccagagataactatggccgcaactatgattatggcatggattattggggccagggcaccctggtgaccgtgagcagcggcggtggcggatccggcggtggcggatccggcggtggcggatccgaaattgtgttgacacagtctccagccaccctgtctttgtctccaggggaaagagccaccctcacctgcagcgccaccagcagtgttagctacatccactggtaccaacagaggcctggccagagccccaggctcctcatctatagcacctccaacctggccagcggcatcccagccaggttcagtggcagtgggtctgggagcgactacactctcaccatcagcagcctagagcctgaagattttgcagtttattactgtcagcagcgtagcagctcccctttcacctttggcagcggcaccaaagtggaaattaaa

SEQ ID NO: 233 - protein, 243 aa, Artificial Sequence
  Humanized E6 single chain GS3
EVQLVESGGGLVKPGGSLRLSCAASGFTFSRYGMSWVRQAPGKRLEWVSTISGGGTYIYYPDSVKGRFTISRDNAKNTLYLQMNSLRAEDTAVYYCTRDNYGRNYDYGMDYWGQGTLVTVSSGGGGSGGGGSGGGGSEIVLTQSPATLSLSPGERATLTCSATSSVSYIHWYQQRPGQSPRLLIYSTSNLASGIPARFSGSGSGSDYTLTISSLEPEDFAVYYCQQRSSSPFTFGSGTKVEIK

SEQ ID NO: 234 - DNA, 747 bp, Artificial Sequence
  Humanized E6 single chain IgG1noC
gaggtgcagctggtggagtctgggggaggcctggtcaagcctggggggtccctgagactctcctgtgcagcctctggattcaccttcagtaggtatggcatgagctgggtccgccaggctccagggaagaggctggagtgggtctcaaccattagtggcggaggcacctacatatactacccagactcagtgaagggccgattcaccatctccagagacaacgccaagaacaccctgtatctgcaaatgaacagcctgagagccgaggacacggctgtgtattactgtaccagagataactatggccgcaactatgattatggcatggattattggggccagggcaccctggtgaccgtgagcagcgataaaacccatactaaaccgccaaaaccggcgccggaactgctgggtggtcctggtaccggtgaaattgtgttgacacagtctccagccaccctgtctttgtctccaggggaaagagccaccctcacctgcagcgccaccagcagtgttagctacatccactggtaccaacagaggcctggccagagccccaggctcctcatctatagcacctccaacctggccagcggcatcccagccaggttcagtggcagtgggtctgggagcgactacactctcaccatcagcagcctagagcctgaagattttgcagtttattactgtcagcagcgtagcagctcccctttcacctttggcagcggcaccaaagtggaaattaaa

SEQ ID NO: 235 - protein, 249 aa, Artificial Sequence
  Humanized E6 single chain IgG1noC
EVQLVESGGGLVKPGGSLRLSCAASGFTFSRYGMSWVRQAPGKRLEWVSTISGGGTYIYYPDSVKGRFTISRDNAKNTLYLQMNSLRAEDTAVYYCTRDNYGRNYDYGMDYWGQGTLVTVSSDKTHTKPPKPAPELLGGPGTGEIVLTQSPATLSLSPGERATLTCSATSSVSYIHWYQQRPGQSPRLLIYSTSNLASGIPARFSGSGSGSDYTLTISSLEPEDFAVYYCQQRSSSPFTFGSGTKVEIK

SEQ ID NO: 236 - DNA, 813 bp, Artificial Sequence
  Humanized E6 single chain X4 (linker is IgG1 and IgG2 modified hinge region)
gaggtgcagctggtggagtctgggggaggcctggtcaagcctggggggtccctgagactctcctgtgcagcctctggattcaccttcagtaggtatggcatgagctgggtccgccaggctccagggaagaggctggagtgggtctcaaccattagtggcggaggcacctacatatactacccagactcagtgaagggccgattcaccatctccagagacaacgccaagaacaccctgtatctgcaaatgaacagcctgagagccgaggacacggctgtgtattactgtaccagagataactatggccgcaactatgattatggcatggattattggggccagggcaccctggtgaccgtgagcagcgataaaacccatactaaaccgccaaaaccggcgccggaactgctgggtggtcctggtaccggtactggtggtccgactattaaacctccgaaacctccgaaacctgctccgaacctgctgggtggtccggaaattgtgttgacacagtctccagccaccctgtctttgtctccaggggaaagagccaccctcacctgcagcgccaccagcagtgttagctacatccactggtaccaacagaggcctggccagagccccaggctcctcatctatagcacctccaacctggccagcggcatcccagccaggttcagtggcagtgggtctgggagcgactacactctcaccatcagcagcctagagcctgaagattttgcagtttattactgtcagcagcgtagcagctcccctttcacctttggcagcggcaccaaagtggaaattaaa

SEQ ID NO: 237 - protein, 271 aa, Artificial Sequence
  Humanized E6 single chain X4 (linker is IgG1 and IgG2 modified hinge region)
EVQLVESGGGLVKPGGSLRLSCAASGFTFSRYGMSWVRQAPGKRLEWVSTISGGGTYIYYPDSVKGRFTISRDNAKNTLYLQMNSLRAEDTAVYYCTRDNYGRNYDYGMDYWGQGTLVTVSSDKTHTKPPKPAPELLGGPGTGTGGPTIKPPKPPKPAPNLLGGPEIVLTQSPATLSLSPGERATLTCSATSSVSYIHWYQQRPGQSPRLLIYSTSNLASGIPARFSGSGSGSDYTLTISSLEPEDFAVYYCQQRSSSPFTFGSGTKVEIK

SEQ ID NO: 238 - DNA, 747 bp, Artificial Sequence
  Humanized C2 single chain GS3
gaggtgcagctggtggagtctgggggaggcctggtcaagcctggggggtccctgagactctcctgtgcagcctctggattcaccttcagtggctatgccatgagctgggtccgccaggctccagggaaggggctggagtgggtctcaaccattagtagtggcggaacctacatatactaccccgactcagtgaagggccgattcaccatctccagagacaacgccaagaactcactgtatctgcaaatgaacagcctgagagccgaggacacggccgtgtattactgtgcgagacttgggggggataattactacgaatacttcgatgtctggggcaaagggaccacggtcaccgtctcctccggcggtggcggatccggcggtggcggatccggcggtggcggatccgacattgtgctgacccagtctccagcctccttggccgtgtctccaggacagagggccaccatcacctgcagagccagtaagagtgtcagtaccagcggatactcctacatgcactggtatcagcagaaaccaggacaacctcctaaactcctgatttacctggcatccaatctggagagcggggtcccagccaggttcagcggcagtgggtctgggaccgatttcaccctcacaattaatcctgtggaagctaatgatactgcaaattattactgtcagcacagtagggagctgcctttcacattcggcggagggaccaaggtggagatcaaacgaact

SEQ ID NO: 239 - protein, 249 aa, Artificial Sequence
  Humanized C2 single chain GS3
EVQLVESGGGLVKPGGSLRLSCAASGFTFSGYAMSWVRQAPGKGLEWVSTISSGGTYIYYPDSVKGRFTISRDNAKNSLYLQMNSLRAEDTAVYYCARLGGDNYYEYFDVWGKGTTVTVSSGGGGSGGGGSGGGGSDIVLTQSPASLAVSPGQRATITCRASKSVSTSGYSYMHWYQQKPGQPPKLLIYLASNLESGVPARFSGSGSGTDFTLTINPVEANDTANYYCQHSRELPFTFGGGTKVEIKRT

SEQ ID NO: 240 - DNA, 765 bp, Artificial Sequence
  Humanized C2 single chain IgG (no Cysteine)
gaggtgcagctggtggagtctgggggaggcctggtcaagcctggggggtccctgagactctcctgtgcagcctctggattcaccttcagtggctatgccatgagctgggtccgccaggctccagggaaggggctggagtgggtctcaaccattagtagtggcggaacctacatatactaccccgactcagtgaagggccgattcaccatctccagagacaacgccaagaactcactgtatctgcaaatgaacagcctgagagccgaggacacggccgtgtattactgtgcgagacttgggggggataattactacgaatacttcgatgtctggggcaaagggaccacggtcaccgtctcctccgataaaacccatactaaaccgccaaaaccggcgccggaactgctgggtggtcctggtaccggtgacattgtgctgacccagtctccagcctccttggccgtgtctccaggacagagggccaccatcacctgcagagccagtaagagtgtcagtaccagcggatactcctacatgcactggtatcagcagaaaccaggacaacctcctaaactcctgatttacctggcatccaatctggagagcggggtcccagccaggttcagcggcagtgggtctgggaccgatttcaccctcacaattaatcctgtggaagctaatgatactgcaaattattactgtcagcacagtagggagctgcctttcacattcggcggagggaccaaggtggagatcaaacgaact

SEQ ID NO: 241 - protein, 255 aa, Artificial Sequence
  Humanized C2 single chain IgG (no Cysteine)
EVQLVESGGGLVKPGGSLRLSCAASGFTFSGYAMSWVRQAPGKGLEWVSTISSGGTYIYYPDSVKGRFTISRDNAKNSLYLQMNSLRAEDTAVYYCARLGGDNYYEYFDVWGKGTTVTVSSDKTHTKPPKPAPELLGGPGTGDIVLTQSPASLAVSPGQRATITCRASKSVSTSGYSYMHWYQQKPGQPPKLLIYLASNLESGVPARFSGSGSGTDFTLTINPVEANDTANYYCQHSRELPFTFGGGTKVEIKRT

SEQ ID NO: 242 - DNA, 831 bp, Artificial Sequence
  Humanized C2 single chain X4 (linker is IgG1 and IgG2 modified hinge region)
gaggtgcagctggtggagtctgggggaggcctggtcaagcctggggggtccctgagactctcctgtgcagcctctggattcaccttcagtggctatgccatgagctgggtccgccaggctccagggaaggggctggagtgggtctcaaccattagtagtggcggaacctacatatactaccccgactcagtgaagggccgattcaccatctccagagacaacgccaagaactcactgtatctgcaaatgaacagcctgagagccgaggacacggccgtgtattactgtgcgagacttgggggggataattactacgaatacttcgatgtctggggcaaagggaccacggtcaccgtctcctccgataaaacccatactaaaccgccaaaaccggcgccggaactgctgggtggtcctggtaccggtactggtggtccgactattaaacctccgaaacctccgaaacctgctccgaacctgctgggtggtccggacattgtgctgacccagtctccagcctccttggccgtgtctccaggacagagggccaccatcacctgcagagccagtaagagtgtcagtaccagcggatactcctacatgcactggtatcagcagaaaccaggacaacctcctaaactcctgatttacctggcatccaatctggagagcggggtcccagccaggttcagcggcagtgggtctgggaccgatttcaccctcacaattaatcctgtggaagctaatgatactgcaaattattactgtcagcacagtagggagctgcctttcacattcggcggagggaccaaggtggagatcaaacgaact

SEQ ID NO: 243 - protein, 277 aa, Artificial Sequence
  Humanized C2 single chain X4 (linker is IgG1 and IgG2 modified hinge region)
EVQLVESGGGLVKPGGSLRLSCAASGFTFSGYAMSWVRQAPGKGLEWVSTISSGGTYIYYPDSVKGRFTISRDNAKNSLYLQMNSLRAEDTAVYYCARLGGDNYYEYFDVWGKGTTVTVSSDKTHTKPPKPAPELLGGPGTGTGGPTIKPPKPPKPAPNLLGGPDIVLTQSPASLAVSPGQRATITCRASKSVSTSGYSYMHWYQQKPGQPPKLLIYLASNLESGVPARFSGSGSGTDFTLTINPVEANDTANYYCQHSRELPFTFGGGTKVEIKRT

SEQ ID NO: 244 - DNA, 744 bp, Artificial Sequence
  Humanized C3 single chain GS3
caggttcagctggtgcagtctggagctgaggtgaagaagcctggggcctcagtgaaggtctcctgcaaggcttctggttacacctttaccgactacgccatgaactgggtgcgacaggcccctggacaagggcttgagtggatgggagtgatcagcaccttcagcggtaacacaaacttcaaccagaagttcaagggcagagtcaccatgaccacagacacatccacgagcacagcctacatggagctgaggagcctgagatctgacgacacggccgtgtattactgtgcgagaagcgactactacggcccatacttcgactactggggccagggcaccaccctgaccgtgtccagcggcggtggcggatccggcggtggcggatccggcggtggcggatccgatattgtgatgacccagactccactctctctgtccgtcacccctggacagccggcctccatctcctgcaggtctagtcagaccattgtccatagtaatggaaacacctatttggagtggtacctgcagaagccaggccagtctccacagctcctgatctataaggtttccaaccggttctctggagtgccagataggttcagtggcagcgggtcagggacagatttcacactgaaaatcagccgggtggaggctgaggatgttggggtttattactgcttccaaggtagccacgtgcctttcaccttcggcggagggaccaaggtggagatcaaacgaact

SEQ ID NO: 245 - protein, 248 aa, Artificial Sequence
  Humanized C3 single chain GS3
QVQLVQSGAEVKKPGASVKVSCKASGYTFTDYAMNWVRQAPGQGLEWMGVISTFSGNTNFNQKFKGRVTMTTDTSTSTAYMELRSLRSDDTAVYYCARSDYYGPYFDYWGQGTTLTVSSGGGGSGGGGSGGGGSDIVMTQTPLSLSVTPGQPASISCRSSQTIVHSNGNTYLEWYLQKPGQSPQLLIYKVSNRFSGVPDRFSGSGSGTDFTLKISRVEAEDVGVYYCFQGSHVPFTFGGGTKVEIKRT

SEQ ID NO: 246 - DNA, 762 bp, Artificial Sequence
  Humanized C3 single chain IgG1 (no Cysteine)
caggttcagctggtgcagtctggagctgaggtgaagaagcctggggcctcagtgaaggtctcctgcaaggcttctggttacacctttaccgactacgccatgaactgggtgcgacaggcccctggacaagggcttgagtggatgggagtgatcagcaccttcagcggtaacacaaacttcaaccagaagttcaagggcagagtcaccatgaccacagacacatccacgagcacagcctacatggagctgaggagcctgagatctgacgacacggccgtgtattactgtgcgagaagcgactactacggcccatacttcgactactggggccagggcaccaccctgaccgtgtccagcgataaaacccatactaaaccgccaaaaccggcgccggaactgctgggtggtcctggtaccggtgatattgtgatgacccagactccactctctctgtccgtcacccctggacagccggcctccatctcctgcaggtctagtcagaccattgtccatagtaatggaaacacctatttggagtggtacctgcagaagccaggccagtctccacagctcctgatctataaggtttccaaccggttctctggagtgccagataggttcagtggcagcgggtcagggacagatttcacactgaaaatcagccgggtggaggctgaggatgttggggtttattactgcttccaaggtagccacgtgcctttcaccttcggcggagggaccaaggtggagatcaaacgaact

SEQ ID NO: 247 - protein, 254 aa, Artificial Sequence
  Humanized C3 single chain IgG1 (no Cysteine)
QVQLVQSGAEVKKPGASVKVSCKASGYTFTDYAMNWVRQAPGQGLEWMGVISTFSGNTNFNQKFKGRVTMTTDTSTSTAYMELRSLRSDDTAVYYCARSDYYGPYFDYWGQGTTLTVSSDKTHTKPPKPAPELLGGPGTGDIVMTQTPLSLSVTPGQPASISCRSSQTIVHSNGNTYLEWYLQKPGQSPQLLIYKVSNRFSGVPDRFSGSGSGTDFTLKISRVEAEDVGVYYCFQGSHVPFTFGGGTKVEIKRT

SEQ ID NO: 248 - DNA, 828 bp, Artificial Sequence
  Humanized C3 single chain X4 (linker is IgG1 and IgG2 modified hinge region)
caggttcagctggtgcagtctggagctgaggtgaagaagcctggggcctcagtgaaggtctcctgcaaggcttctggttacacctttaccgactacgccatgaactgggtgcgacaggcccctggacaagggcttgagtggatgggagtgatcagcaccttcagcggtaacacaaacttcaaccagaagttcaagggcagagtcaccatgaccacagacacatccacgagcacagcctacatggagctgaggagcctgagatctgacgacacggccgtgtattactgtgcgagaagcgactactacggcccatacttcgactactggggccagggcaccaccctgaccgtgtccagcgataaaacccatactaaaccgccaaaaccggcgccggaactgctgggtggtcctggtaccggtactggtggtccgactattaaacctccgaaacctccgaaacctgctccgaacctgctgggtggtccggatattgtgatgacccagactccactctctctgtccgtcacccctggacagccggcctccatctcctgcaggtctagtcagaccattgtccatagtaatggaaacacctatttggagtggtacctgcagaagccaggccagtctccacagctcctgatctataaggtttccaaccggttctctggagtgccagataggttcagtggcagcgggtcagggacagatttcacactgaaaatcagccgggtggaggctgaggatgttggggtttattactgcttccaaggtagccacgtgcctttcaccttcggcggagggaccaaggtggagatcaaacgaact

SEQ ID NO: 249 - protein, 276 aa, Artificial Sequence
  Humanized C3 single chain X4 (linker is IgG1 and IgG2 modified hinge region)
QVQLVQSGAEVKKPGASVKVSCKASGYTFTDYAMNWVRQAPGQGLEWMGVISTFSGNTNFNQKFKGRVTMTTDTSTSTAYMELRSLRSDDTAVYYCARSDYYGPYFDYWGQGTTLTVSSDKTHTKPPKPAPELLGGPGTGTGGPTIKPPKPPKPAPNLLGGPDIVMTQTPLSLSVTPGQPASISCRSSQTIVHSNGNTYLEWYLQKPGQSPQLLIYKVSNRFSGVPDRFSGSGSGTDFTLKISRVEAEDVGVYYCFQGSHVPFTFGGGTKVEIKRT

SEQ ID NO: 250 - DNA, 741 bp, Artificial Sequence
  Humanized C8 single chain GS3 (linker is [Gly4Ser1]3)
gaggtgcagctggtggagtctgggggaggcctggtcaagcctggggggtccctgagactctcctgtgcagcctctggattcaccttcagtggctatgccatgagctgggtccgccaggctccagggaaggggctggagtgggtctcaaccattagtagtggcggaacctacatatactaccctgactcagtgaagggccgattcaccatctccagagacaacgccaagaactcactgtatctgcaaatgaacagcctgagagccgaggacacggccgtgtattactgtgcgagactgggcggcgataactattatgaatattggggcaaagggaccacggtcaccgtctcctccggcggtggcggatccggcggtggcggatccggcggtggcggatccgacatcgtgatgacccagtctccagactccctggctgtgtctctgggcgagagggccaccatcaactgcagggccagcaagagtgttagcaccagcggctacagctacatgcactggtaccagcagaaaccaggacagcctcctaagctgctcatttacctggtgtctaacctggaatccggggtccctgaccgattcagtggcagcgggtctgggacagatttcactctcaccatcagcagcctgcaggctgaagatgtggcagtttattactgtcaacacattcgggaactgaccaggagtgaattcggcggagggaccaaggtggagatcaaacgaact

SEQ ID NO: 251 - protein, 247 aa, Artificial Sequence
  Humanized C8 single chain GS3 (linker is [Gly4Ser1]3)
EVQLVESGGGLVKPGGSLRLSCAASGFTFSGYAMSWVRQAPGKGLEWVSTISSGGTYIYYPDSVKGRFTISRDNAKNSLYLQMNSLRAEDTAVYYCARLGGDNYYEYWGKGTTVTVSSGGGGSGGGGSGGGGSDIVMTQSPDSLAVSLGERATINCRASKSVSTSGYSYMHWYQQKPGQPPKLLIYLVSNLESGVPDRFSGSGSGTDFTLTISSLQAEDVAVYYCQHIRELTRSEFGGGTKVEIKRT

SEQ ID NO: 252 - DNA, 759 bp, Artificial Sequence
  Humanized C8 single chain IgG1 (no Cysteine)
gaggtgcagctggtggagtctgggggaggcctggtcaagcctggggggtccctgagactctcctgtgcagcctctggattcaccttcagtggctatgccatgagctgggtccgccaggctccagggaaggggctggagtgggtctcaaccattagtagtggcggaacctacatatactaccctgactcagtgaagggccgattcaccatctccagagacaacgccaagaactcactgtatctgcaaatgaacagcctgagagccgaggacacggccgtgtattactgtgcgagactgggcggcgataactattatgaatattggggcaaagggaccacggtcaccgtctcctccgataaaacccatactaaaccgccaaaaccggcgccggaactgctgggtggtcctggtaccggtgacatcgtgatgacccagtctccagactccctggctgtgtctctgggcgagagggccaccatcaactgcagggccagcaagagtgttagcaccagcggctacagctacatgcactggtaccagcagaaaccaggacagcctcctaagctgctcatttacctggtgtctaacctggaatccggggtccctgaccgattcagtggcagcgggtctgggacagatttcactctcaccatcagcagcctgcaggctgaagatgtggcagtttattactgtcaacacattcgggaactgaccaggagtgaattcggcggagggaccaaggtggagatcaaacgaact

SEQ ID NO: 253 - protein, 253 aa, Artificial Sequence
  Humanized C8 single chain IgG1 (no Cysteine)
EVQLVESGGGLVKPGGSLRLSCAASGFTFSGYAMSWVRQAPGKGLEWVSTISSGGTYIYYPDSVKGRFTISRDNAKNSLYLQMNSLRAEDTAVYYCARLGGDNYYEYWGKGTTVTVSSDKTHTKPPKPAPELLGGPGTGDIVMTQSPDSLAVSLGERATINCRASKSVSTSGYSYMHWYQQKPGQPPKLLIYLVSNLESGVPDRFSGSGSGTDFTLTISSLQAEDVAVYYCQHIRELTRSEFGGGTKVEIKRT

SEQ ID NO: 254 - DNA, 825 bp, Artificial Sequence
  Humanized C8 single chain X4 (linker is IgG1 and IgG2 modified hinge region)
gaggtgcagctggtggagtctgggggaggcctggtcaagcctggggggtccctgagactctcctgtgcagcctctggattcaccttcagtggctatgccatgagctgggtccgccaggctccagggaaggggctggagtgggtctcaaccattagtagtggcggaacctacatatactacccagactcagtgaagggccgattcaccatctccagagacaacgccaagaactcactgtatctgcaaatgaacagcctgagagccgaggacacggccgtgtattactgtgcgagactgggcggcgacaattactatgagtattggggcaaagggaccacggtcaccgtctcctccgataaaacccatactaaaccgccaaaaccggcgccggaactgctgggtggtcctggtaccggtactggtggtccgactattaaacctccgaaacctccgaaacctgctccgaacctgctgggtggtccggacatcgtgatgacccagtctccagactccctggctgtgtctctgggcgagagggccaccatcaactgcagggccagcaagagtgttagcaccagcggctacagctacatgcactggtaccagcagaaaccaggacagcctcctaagctgctcatttacctggtgtctaacctggaatccggggtccctgaccgattcagtggcagcgggtctgggacagatttcactctcaccatcagcagcctgcaggctgaagatgtggcagtttattactgtcaacacattcgggaactgaccaggagtgaattcggcggagggaccaaggtggagatcaaacgaact

SEQ ID NO: 255 - protein, 275 aa, Artificial Sequence
  Humanized C8 single chain X4 (linker is IgG1 and IgG2 modified hinge region)
EVQLVESGGGLVKPGGSLRLSCAASGFTFSGYAMSWVRQAPGKGLEWVSTISSGGTYIYYPDSVKGRFTISRDNAKNSLYLQMNSLRAEDTAVYYCARLGGDNYYEYWGKGTTVTVSSDKTHTKPPKPAPELLGGPGTGTGGPTIKPPKPPKPAPNLLGGPDIVMTQSPDSLAVSLGERATINCRASKSVSTSGYSYMHWYQQKPGQPPKLLIYLVSNLESGVPDRFSGSGSGTDFTLTISSLQAEDVAVYYCQHIRELTRSEFGGGTKVEIKRT

SEQ ID NO: 256 - DNA, 1509 bp, Artificial Sequence
  pSECTag2 E6 scFV-FC
atggagacagacacactcctgctatgggtactgctgctctgggttccaggttccactggtgacgcggcccagccggccgaggtgcagctggtggagtctgggggaggcctggtcaagcctggggggtccctgagactctcctgtgcagcctctggattcaccttcagtaggtatggcatgagctgggtccgccaggctccagggaagaggctggagtgggtctcaaccattagtggcggaggcacctacatatactacccagactcagtgaagggccgattcaccatctccagagacaacgccaagaacaccctgtatctgcaaatgaacagcctgagagccgaggacacggctgtgtattactgtaccagagataactatggccgcaactatgattatggcatggattattggggccagggcaccctggtgaccgtgagcagcggcggtggcggatccggcggtggcggatccggcggtggcggatccgaaattgtgttgacacagtctccagccaccctgtctttgtctccaggggaaagagccaccctcacctgcagcgccaccagcagtgttagctacatccactggtaccaacagaggcctggccagagccccaggctcctcatctatagcacctccaacctggccagcggcatcccagccaggttcagtggcagtgggtctgggagcgactacactctcaccatcagcagcctagagcctgaagattttgcagtttattactgtcagcagcgtagcagctcccctttcacctttggcagcggcaccaaagtggaaattaaagagcccaaatcttgtgacaaaactcacacatgcccaccgtgcccagcacctgaactcctggggggaccgtcagtcttcctcttccccccaaaacccaaggacaccctcatgatctcccggacccctgaggtcacatgcgtggtggtggacgtgagccacgaagaccctgaggtcaagttcaactggtacgtggacggcgtggaggtgcataatgccaagacaaagccgcgggaggagcagtacaacagcacgtaccgtgtggtcagcgtcctcaccgtcctgcaccaggactggctgaatggcaaggagtacaagtgcaaggtctccaacaaagccctcccagcccccatcgagaaaaccatctccaaagccaaagggcagccccgagaaccacaggtgtacaccctgcccccatcccgggaggagatgaccaagaaccaggtcagcctgacctgcctggtcaaaggcttctatcccagcgacatcgccgtggagtgggagagcaatgggcagccggagaacaactacaagaccacgcctcccgtgctggactccgacggctccttcttcctctacagcaagctcaccgtggacaagagcaggtggcagcaggggaacgtcttctcatgctccgtgatgcatgaggctctgcacaaccactacacgcagaagagcctctccctgtctccgggtaaatgataa

SEQ ID NO: 257 - protein, 501 aa, Artificial Sequence
  pSECTag2 E6 scFV-FC
METDTLLLWVLLLWVPGSTGDAAQPAEVQLVESGGGLVKPGGSLRLSCAASGFTFSRYGMSWVRQAPGKRLEWVSTISGGGTYIYYPDSVKGRFTISRDNAKNTLYLQMNSLRAEDTAVYYCTRDNYGRNYDYGMDYWGQGTLVTVSSGGGGSGGGGSGGGGSEIVLTQSPATLSLSPGERATLTCSATSSVSYIHWYQQRPGQSPRLLIYSTSNLASGIPARFSGSGSGSDYTLTISSLEPEDFAVYYCQQRSSSPFTFGSGTKVEIKEPKSCDKTHTCPPCPAPELLGGPSVFLFPPKPKDTLMISRTPEVTCVVVDVSHEDPEVKFNWYVDGVEVHNAKTKPREEQYNSTYRVVSVLTVLHQDWLNGKEYKCKVSNKALPAPIEKTISKAKGQPREPQVYTLPPSREEMTKNQVSLTCLVKGFYPSDIAVEWESNGQPENNYKTTPPVLDSDGSFFLYSKLTVDKSRWQQGNVFSCSVMHEALHNHYTQKSLSLSPGK

SEQ ID NO: 258 - DNA, 496 bp, Artificial Sequence
  E6 scFC-FC 1 gBLOCk sequence
tgctctgggttccaggttccactggtgacgcggcccagccggccgaggtgcagctggtggagtctgggggaggcctggtcaagcctggggggtccctgagactctcctgtgcagcctctggattcaccttcagtaggtatggcatgagctgggtccgccaggctccagggaagaggctggagtgggtctcaaccattagtggcggaggcacctacatatactacccagactcagtgaagggccgattcaccatctccagagacaacgccaagaacaccctgtatctgcaaatgaacagcctgagagccgaggacacggctgtgtattactgtaccagagataactatggccgcaactatgattatggcatggattattggggccagggcaccctggtgaccgtgagcagcggcggtggcggatccggcggtggcggatccggcggtggcggatccgaaattgtgttgacacagtctccagccaccctgtctttgtc

SEQ ID NO: 259 - DNA, 583 bp, Artificial Sequence
  E6 scFC-FC 2 gBLOCk sequence
aattgtgttgacacagtctccagccaccctgtctttgtctccaggggaaagagccaccctcacctgcagcgccaccagcagtgttagctacatccactggtaccaacagaggcctggccagagccccaggctcctcatctatagcacctccaacctggccagcggcatcccagccaggttcagtggcagtgggtctgggagcgactacactctcaccatcagcagcctagagcctgaagattttgcagtttattactgtcagcagcgtagcagctcccctttcacctttggcagcggcaccaaagtggaaattaaagagcccaaatcttgtgacaaaactcacacatgcccaccgtgcccagcacctgaactcctggggggaccgtcagtcttcctcttccccccaaaacccaaggacaccctcatgatctcccggacccctgaggtcacatgcgtggtggtggacgtgagccacgaagaccctgaggtcaagttcaactggtacgtggacggcgtggaggtgcataatgccaagacaaagccgcgggaggagcagtacaacagcacgtaccgtgtggtcagc

SEQ ID NO: 260 - DNA, 1527 bp, Artificial Sequence
  pSECTag2 C2 scFV-FC
atggagacagacacactcctgctatgggtactgctgctctgggttccaggttccactggtgacgcggcccagccggccgaggtgcagctggtggagtctgggggaggcctggtcaagcctggggggtccctgagactctcctgtgcagcctctggattcaccttcagtggctatgccatgagctgggtccgccaggctccagggaaggggctggagtgggtctcaaccattagtagtggcggaacctacatatactaccccgactcagtgaagggccgattcaccatctccagagacaacgccaagaactcactgtatctgcaaatgaacagcctgagagccgaggacacggccgtgtattactgtgcgagacttgggggggataattactacgaatacttcgatgtctggggcaaagggaccacggtcaccgtctcctccggcggtggcggatccggcggtggcggatccggcggtggcggatccgacattgtgctgacccagtctccagcctccttggccgtgtctccaggacagagggccaccatcacctgcagagccagtaagagtgtcagtaccagcggatactcctacatgcactggtatcagcagaaaccaggacaacctcctaaactcctgatttacctggcatccaatctggagagcggggtcccagccaggttcagcggcagtgggtctgggaccgatttcaccctcacaattaatcctgtggaagctaatgatactgcaaattattactgtcagcacagtagggagctgcctttcacattcggcggagggaccaaggtggagatcaaacgaactgagcccaaatcttgtgacaaaactcacacatgcccaccgtgcccagcacctgaactcctggggggaccgtcagtcttcctcttccccccaaaacccaaggacaccctcatgatctcccggacccctgaggtcacatgcgtggtggtggacgtgagccacgaagaccctgaggtcaagttcaactggtacgtggacggcgtggaggtgcataatgccaagacaaagccgcgggaggagcagtacaacagcacgtaccgtgtggtcagcgtcctcaccgtcctgcaccaggactggctgaatggcaaggagtacaagtgcaaggtctccaacaaagccctcccagcccccatcgagaaaaccatctccaaagccaaagggcagccccgagaaccacaggtgtacaccctgcccccatcccgggaggagatgaccaagaaccaggtcagcctgacctgcctggtcaaaggcttctatcccagcgacatcgccgtggagtgggagagcaatgggcagccggagaacaactacaagaccacgcctcccgtgctggactccgacggctccttcttcctctacagcaagctcaccgtggacaagagcaggtggcagcaggggaacgtcttctcatgctccgtgatgcatgaggctctgcacaaccactacacgcagaagagcctctccctgtctccgggtaaatgataa

SEQ ID NO: 261 - protein, 507 aa, Artificial Sequence
  pSECTag2 C2 scFV-FC
METDTLLLWVLLLWVPGSTGDAAQPAEVQLVESGGGLVKPGGSLRLSCAASGFTFSGYAMSWVRQAPGKGLEWVSTISSGGTYIYYPDSVKGRFTISRDNAKNSLYLQMNSLRAEDTAVYYCARLGGDNYYEYFDVWGKGTTVTVSSGGGGSGGGGSGGGGSDIVLTQSPASLAVSPGQRATITCRASKSVSTSGYSYMHWYQQKPGQPPKLLIYLASNLESGVPARFSGSGSGTDFTLTINPVEANDTANYYCQHSRELPFTFGGGTKVEIKRTEPKSCDKTHTCPPCPAPELLGGPSVFLFPPKPKDTLMISRTPEVTCVVVDVSHEDPEVKFNWYVDGVEVHNAKTKPREEQYNSTYRVVSVLTVLHQDWLNGKEYKCKVSNKALPAPIEKTISKAKGQPREPQVYTLPPSREEMTKNQVSLTCLVKGFYPSDIAVEWESNGQPENNYKTTPPVLDSDGSFFLYSKLTVDKSRWQQGNVFSCSVMHEALHNHYTQKSLSLSPGK

SEQ ID NO: 262 - DNA, 487 bp, Artificial Sequence
  C2 scFV-FC 1 gBLOCk sequence
tgctctgggttccaggttccactggtgacgcggcccagccggccgaggtgcagctggtggagtctgggggaggcctggtcaagcctggggggtccctgagactctcctgtgcagcctctggattcaccttcagtggctatgccatgagctgggtccgccaggctccagggaaggggctggagtgggtctcaaccattagtagtggcggaacctacatatactaccccgactcagtgaagggccgattcaccatctccagagacaacgccaagaactcactgtatctgcaaatgaacagcctgagagccgaggacacggccgtgtattactgtgcgagacttgggggggataattactacgaatacttcgatgtctggggcaaagggaccacggtcaccgtctcctccggcggtggcggatccggcggtggcggatccggcggtggcggatccgacattgtgctgacccagtctccagcctccttggc

SEQ ID NO: 263 - DNA, 604 bp, Artificial Sequence
  C2 scFV-FC 2 gBLOCk sequence
cattgtgctgacccagtctccagcctccttggccgtgtctccaggacagagggccaccatcacctgcagagccagtaagagtgtcagtaccagcggatactcctacatgcactggtatcagcagaaaccaggacaacctcctaaactcctgatttacctggcatccaatctggagagcggggtcccagccaggttcagcggcagtgggtctgggaccgatttcaccctcacaattaatcctgtggaagctaatgatactgcaaattattactgtcagcacagtagggagctgcctttcacattcggcggagggaccaaggtggagatcaaacgaactgagcccaaatcttgtgacaaaactcacacatgcccaccgtgcccagcacctgaactcctggggggaccgtcagtcttcctcttccccccaaaacccaaggacaccctcatgatctcccggacccctgaggtcacatgcgtggtggtggacgtgagccacgaagaccctgaggtcaagttcaactggtacgtggacggcgtggaggtgcataatgccaagacaaagccgcgggaggagcagtacaacagcacgtaccgtgtggtcagc

SEQ ID NO: 264 - DNA, 1524 bp, Artificial Sequence
  pSECTag2 C3 scFV-FC
atggagacagacacactcctgctatgggtactgctgctctgggttccaggttccactggtgacgcggcccagccggcccaggttcagctggtgcagtctggagctgaggtgaagaagcctggggcctcagtgaaggtctcctgcaaggcttctggttacacctttaccgactacgccatgaactgggtgcgacaggcccctggacaagggcttgagtggatgggagtgatcagcaccttcagcggtaacacaaacttcaaccagaagttcaagggcagagtcaccatgaccacagacacatccacgagcacagcctacatggagctgaggagcctgagatctgacgacacggccgtgtattactgtgcgagaagcgactactacggcccatacttcgactactggggccagggcaccaccctgaccgtgtccagcggcggtggcggatccggcggtggcggatccggcggtggcggatccgatattgtgatgacccagactccactctctctgtccgtcacccctggacagccggcctccatctcctgcaggtctagtcagaccattgtccatagtaatggaaacacctatttggagtggtacctgcagaagccaggccagtctccacagctcctgatctataaggtttccaaccggttctctggagtgccagataggttcagtggcagcgggtcagggacagatttcacactgaaaatcagccgggtggaggctgaggatgttggggtttattactgcttccaaggtagccacgtgcctttcaccttcggcggagggaccaaggtggagatcaaacgaactgagcccaaatcttgtgacaaaactcacacatgcccaccgtgcccagcacctgaactcctggggggaccgtcagtcttcctcttccccccaaaacccaaggacaccctcatgatctcccggacccctgaggtcacatgcgtggtggtggacgtgagccacgaagaccctgaggtcaagttcaactggtacgtggacggcgtggaggtgcataatgccaagacaaagccgcgggaggagcagtacaacagcacgtaccgtgtggtcagcgtcctcaccgtcctgcaccaggactggctgaatggcaaggagtacaagtgcaaggtctccaacaaagccctcccagcccccatcgagaaaaccatctccaaagccaaagggcagccccgagaaccacaggtgtacaccctgcccccatcccgggaggagatgaccaagaaccaggtcagcctgacctgcctggtcaaaggcttctatcccagcgacatcgccgtggagtgggagagcaatgggcagccggagaacaactacaagaccacgcctcccgtgctggactccgacggctccttcttcctctacagcaagctcaccgtggacaagagcaggtggcagcaggggaacgtcttctcatgctccgtgatgcatgaggctctgcacaaccactacacgcagaagagcctctccctgtctccgggtaaatgataa

SEQ ID NO: 265 - protein, 506 aa, Artificial Sequence
  pSECTag2 C3 scFV-FC
METDTLLLWVLLLWVPGSTGDAAQPAQVQLVQSGAEVKKPGASVKVSCKASGYTFTDYAMNWVRQAPGQGLEWMGVISTFSGNTNFNQKFKGRVTMTTDTSTSTAYMELRSLRSDDTAVYYCARSDYYGPYFDYWGQGTTLTVSSGGGGSGGGGSGGGGSDIVMTQTPLSLSVTPGQPASISCRSSQTIVHSNGNTYLEWYLQKPGQSPQLLIYKVSNRFSGVPDRFSGSGSGTDFTLKISRVEAEDVGVYYCFQGSHVPFTFGGGTKVEIKRTEPKSCDKTHTCPPCPAPELLGGPSVFLFPPKPKDTLMISRTPEVTCVVVDVSHEDPEVKFNWYVDGVEVHNAKTKPREEQYNSTYRVVSVLTVLHQDWLNGKEYKCKVSNKALPAPIEKTISKAKGQPREPQVYTLPPSREEMTKNQVSLTCLVKGFYPSDIAVEWESNGQPENNYKTTPPVLDSDGSFFLYSKLTVDKSRWQQGNVFSCSVMHEALHNHYTQKSLSLSPGK

SEQ ID NO: 266 - DNA, 480 bp, Artificial Sequence
  C3 GS scFV FC 1 gBLOCk sequence
tgctctgggttccaggttccactggtgacgcggcccagccggcccaggttcagctggtgcagtctggagctgaggtgaagaagcctggggcctcagtgaaggtctcctgcaaggcttctggttacacctttaccgactacgccatgaactgggtgcgacaggcccctggacaagggcttgagtggatgggagtgatcagcaccttcagcggtaacacaaacttcaaccagaagttcaagggcagagtcaccatgaccacagacacatccacgagcacagcctacatggagctgaggagcctgagatctgacgacacggccgtgtattactgtgcgagaagcgactactacggcccatacttcgactactggggccagggcaccaccctgaccgtgtccagcggcggtggcggatccggcggtggcggatccggcggtggcggatccgatattgtgatgacccagactccactctctctgt

SEQ ID NO: 267 - DNA, 607 bp, Artificial Sequence
  C3 scFV FC2 gBLOCk sequence
tattgtgatgacccagactccactctctctgtccgtcacccctggacagccggcctccatctcctgcaggtctagtcagaccattgtccatagtaatggaaacacctatttggagtggtacctgcagaagccaggccagtctccacagctcctgatctataaggtttccaaccggttctctggagtgccagataggttcagtggcagcgggtcagggacagatttcacactgaaaatcagccgggtggaggctgaggatgttggggtttattactgcttccaaggtagccacgtgcctttcaccttcggcggagggaccaaggtggagatcaaacgaactgagcccaaatcttgtgacaaaactcacacatgcccaccgtgcccagcacctgaactcctggggggaccgtcagtcttcctcttccccccaaaacccaaggacaccctcatgatctcccggacccctgaggtcacatgcgtggtggtggacgtgagccacgaagaccctgaggtcaagttcaactggtacgtggacggcgtggaggtgcataatgccaagacaaagccgcgggaggagcagtacaacagcacgtaccgtgtggtcagc

SEQ ID NO: 268 - DNA, 1521 bp, Artificial Sequence
  pSECTag2 C8 scFV-FC
atggagacagacacactcctgctatgggtactgctgctctgggttccaggttccactggtgacgcggcccagccggccgaggtgcagctggtggagtctgggggaggcctggtcaagcctggggggtccctgagactctcctgtgcagcctctggattcaccttcagtggctatgccatgagctgggtccgccaggctccagggaaggggctggagtgggtctcaaccattagtagtggcggaacctacatatactaccctgactcagtgaagggccgattcaccatctccagagacaacgccaagaactcactgtatctgcaaatgaacagcctgagagccgaggacacggccgtgtattactgtgcgagactgggcggcgataactattatgaatattggggcaaagggaccacggtcaccgtctcctccggcggtggcggatccggcggtggcggatccggcggtggcggatccgacatcgtgatgacccagtctccagactccctggctgtgtctctgggcgagagggccaccatcaactgcagggccagcaagagtgttagcaccagcggctacagctacatgcactggtaccagcagaaaccaggacagcctcctaagctgctcatttacctggtgtctaacctggaatccggggtccctgaccgattcagtggcagcgggtctgggacagatttcactctcaccatcagcagcctgcaggctgaagatgtggcagtttattactgtcaacacattcgggaactgaccaggagtgaattcggcggagggaccaaggtggagatcaaacgaactgagcccaaatcttgtgacaaaactcacacatgcccaccgtgcccagcacctgaactcctggggggaccgtcagtcttcctcttccccccaaaacccaaggacaccctcatgatctcccggacccctgaggtcacatgcgtggtggtggacgtgagccacgaagaccctgaggtcaagttcaactggtacgtggacggcgtggaggtgcataatgccaagacaaagccgcgggaggagcagtacaacagcacgtaccgtgtggtcagcgtcctcaccgtcctgcaccaggactggctgaatggcaaggagtacaagtgcaaggtctccaacaaagccctcccagcccccatcgagaaaaccatctccaaagccaaagggcagccccgagaaccacaggtgtacaccctgcccccatcccgggaggagatgaccaagaaccaggtcagcctgacctgcctggtcaaaggcttctatcccagcgacatcgccgtggagtgggagagcaatgggcagccggagaacaactacaagaccacgcctcccgtgctggactccgacggctccttcttcctctacagcaagctcaccgtggacaagagcaggtggcagcaggggaacgtcttctcatgctccgtgatgcatgaggctctgcacaaccactacacgcagaagagcctctccctgtctccgggtaaatgataa

SEQ ID NO: 269 - protein, 505 aa, Artificial Sequence
  pSECTag2 C8 scFV-FC
METDTLLLWVLLLWVPGSTGDAAQPAEVQLVESGGGLVKPGGSLRLSCAASGFTFSGYAMSWVRQAPGKGLEWVSTISSGGTYIYYPDSVKGRFTISRDNAKNSLYLQMNSLRAEDTAVYYCARLGGDNYYEYWGKGTTVTVSSGGGGSGGGGSGGGGSDIVMTQSPDSLAVSLGERATINCRASKSVSTSGYSYMHWYQQKPGQPPKLLIYLVSNLESGVPDRFSGSGSGTDFTLTISSLQAEDVAVYYCQHIRELTRSEFGGGTKVEIKRTEPKSCDKTHTCPPCPAPELLGGPSVFLFPPKPKDTLMISRTPEVTCVVVDVSHEDPEVKFNWYVDGVEVHNAKTKPREEQYNSTYRVVSVLTVLHQDWLNGKEYKCKVSNKALPAPIEKTISKAKGQPREPQVYTLPPSREEMTKNQVSLTCLVKGFYPSDIAVEWESNGQPENNYKTTPPVLDSDGSFFLYSKLTVDKSRWQQGNVFSCSVMHEALHNHYTQKSLSLSPGK

SEQ ID NO: 270 - DNA, 477 bp, Artificial Sequence
  C8 scFV FC 1 gBLOCk sequence
tgctctgggttccaggttccactggtgacgcggcccagccggccgaggtgcagctggtggagtctgggggaggcctggtcaagcctggggggtccctgagactctcctgtgcagcctctggattcaccttcagtggctatgccatgagctgggtccgccaggctccagggaaggggctggagtgggtctcaaccattagtagtggcggaacctacatatactaccctgactcagtgaagggccgattcaccatctccagagacaacgccaagaactcactgtatctgcaaatgaacagcctgagagccgaggacacggccgtgtattactgtgcgagactgggcggcgataactattatgaatattggggcaaagggaccacggtcaccgtctcctccggcggtggcggatccggcggtggcggatccggcggtggcggatccgacatcgtgatgacccagtctccagactccctgg

SEQ ID NO: 271 - DNA, 607 bp, Artificial Sequence
  C8 scFV FC2 gBLOCk sequence
catcgtgatgacccagtctccagactccctggctgtgtctctgggcgagagggccaccatcaactgcagggccagcaagagtgttagcaccagcggctacagctacatgcactggtaccagcagaaaccaggacagcctcctaagctgctcatttacctggtgtctaacctggaatccggggtccctgaccgattcagtggcagcgggtctgggacagatttcactctcaccatcagcagcctgcaggctgaagatgtggcagtttattactgtcaacacattcgggaactgaccaggagtgaattcggcggagggaccaaggtggagatcaaacgaactgagcccaaatcttgtgacaaaactcacacatgcccaccgtgcccagcacctgaactcctggggggaccgtcagtcttcctcttccccccaaaacccaaggacaccctcatgatctcccggacccctgaggtcacatgcgtggtggtggacgtgagccacgaagaccctgaggtcaagttcaactggtacgtggacggcgtggaggtgcataatgccaagacaaagccgcgggaggagcagtacaacagcacgtaccgtgtggtcagc

SEQ ID NO: 272 - DNA, 702 bp, Artificial Sequence
  Human IgG1 Fc sequence
gagcccaaatcttgtgacaaaactcacacatgcccaccgtgcccagcacctgaactcctggggggaccgtcagtcttcctcttccccccaaaacccaaggacaccctcatgatctcccggacccctgaggtcacatgcgtggtggtggacgtgagccacgaagaccctgaggtcaagttcaactggtacgtggacggcgtggaggtgcataatgccaagacaaagccgcgggaggagcagtacaacagcacgtaccgtgtggtcagcgtcctcaccgtcctgcaccaggactggctgaatggcaaggagtacaagtgcaaggtctccaacaaagccctcccagcccccatcgagaaaaccatctccaaagccaaagggcagccccgagaaccacaggtgtacaccctgcccccatcccgggaggagatgaccaagaaccaggtcagcctgacctgcctggtcaaaggcttctatcccagcgacatcgccgtggagtgggagagcaatgggcagccggagaacaactacaagaccacgcctcccgtgctggactccgacggctccttcttcctctacagcaagctcaccgtggacaagagcaggtggcagcaggggaacgtcttctcatgctccgtgatgcatgaggctctgcacaaccactacacgcagaagagcctctccctgtctccgggtaaatgataa

SEQ ID NO: 273 - protein, 232 aa, Artificial Sequence
  Human IgG1 Fc sequence
EPKSCDKTHTCPPCPAPELLGGPSVFLFPPKPKDTLMISRTPEVTCVVVDVSHEDPEVKFNWYVDGVEVHNAKTKPREEQYNSTYRVVSVLTVLHQDWLNGKEYKCKVSNKALPAPIEKTISKAKGQPREPQVYTLPPSREEMTKNQVSLTCLVKGFYPSDIAVEWESNGQPENNYKTTPPVLDSDGSFFLYSKLTVDKSRWQQGNVFSCSVMHEALHNHYTQKSLSLSPGK

SEQ ID NO: 274 - DNA, 666 bp, Artificial Sequence
  Human IgG1 CH2-CH3 domain sequence
ccgtgcccagcacctgaactcctggggggaccgtcagtcttcctcttccccccaaaacccaaggacaccctcatgatctcccggacccctgaggtcacatgcgtggtggtggacgtgagccacgaagaccctgaggtcaagttcaactggtacgtggacggcgtggaggtgcataatgccaagacaaagccgcgggaggagcagtacaacagcacgtaccgtgtggtcagcgtcctcaccgtcctgcaccaggactggctgaatggcaaggagtacaagtgcaaggtctccaacaaagccctcccagcccccatcgagaaaaccatctccaaagccaaagggcagccccgagaaccacaggtgtacaccctgcccccatcccgggaggagatgaccaagaaccaggtcagcctgacctgcctggtcaaaggcttctatcccagcgacatcgccgtggagtgggagagcaatgggcagccggagaacaactacaagaccacgcctcccgtgctggactccgacggctccttcttcctctacagcaagctcaccgtggacaagagcaggtggcagcaggggaacgtcttctcatgctccgtgatgcatgaggctctgcacaaccactacacgcagaagagcctctccctgtctccgggtaaatgataa

SEQ ID NO: 275 - protein, 220 aa, Artificial Sequence
  Human IgG1 CH2-CH3 domain sequence
PCPAPELLGGPSVFLFPPKPKDTLMISRTPEVTCVVVDVSHEDPEVKFNWYVDGVEVHNAKTKPREEQYNSTYRVVSVLTVLHQDWLNGKEYKCKVSNKALPAPIEKTISKAKGQPREPQVYTLPPSREEMTKNQVSLTCLVKGFYPSDIAVEWESNGQPENNYKTTPPVLDSDGSFFLYSKLTVDKSRWQQGNVFSCSVMHEALHNHYTQKSLSLSPGK

SEQ ID NO: 276 - DNA, 327 bp, Artificial Sequence
  Human IgG1 CH3 domain sequence
gggcagccccgagaaccacaggtgtacaccctgcccccatcccgggaggagatgaccaagaaccaggtcagcctgacctgcctggtcaaaggcttctatcccagcgacatcgccgtggagtgggagagcaatgggcagccggagaacaactacaagaccacgcctcccgtgctggactccgacggctccttcttcctctacagcaagctcaccgtggacaagagcaggtggcagcaggggaacgtcttctcatgctccgtgatgcatgaggctctgcacaaccactacacgcagaagagcctctccctgtctccgggtaaatgataa

SEQ ID NO: 277 - protein, 107 aa, Artificial Sequence
  Human IgG1 CH3 domain sequence
GQPREPQVYTLPPSREEMTKNQVSLTCLVKGFYPSDIAVEWESNGQPENNYKTTPPVLDSDGSFFLYSKLTVDKSRWQQGNVFSCSVMHEALHNHYTQKSLSLSPGK

SEQ ID NO: 278 - DNA, 702 bp, Artificial Sequence
  Human IgG1 Fc Y407R sequence
gagcccaaatcttgtgacaaaactcacacatgcccaccgtgcccagcacctgaactcctggggggaccgtcagtcttcctcttccccccaaaacccaaggacaccctcatgatctcccggacccctgaggtcacatgcgtggtggtggacgtgagccacgaagaccctgaggtcaagttcaactggtacgtggacggcgtggaggtgcataatgccaagacaaagccgcgggaggagcagtacaacagcacgtaccgtgtggtcagcgtcctcaccgtcctgcaccaggactggctgaatggcaaggagtacaagtgcaaggtctccaacaaagccctcccagcccccatcgagaaaaccatctccaaagccaaagggcagccccgagaaccacaggtgtacaccctgcccccatcccgggaggagatgaccaagaaccaggtcagcctgacctgcctggtcaaaggcttctatcccagcgacatcgccgtggagtgggagagcaatgggcagccggagaacaactacaagaccacgcctcccgtgctggactccgacggctccttcttcctcaggagcaagctcaccgtggacaagagcaggtggcagcaggggaacgtcttctcatgctccgtgatgcatgaggctctgcacaaccactacacgcagaagagcctctccctgtctccgggtaaatgataa

SEQ ID NO: 279 - protein, 232 aa, Artificial Sequence
  Human IgG1 Fc Y407R sequence
EPKSCDKTHTCPPCPAPELLGGPSVFLFPPKPKDTLMISRTPEVTCVVVDVSHEDPEVKFNWYVDGVEVHNAKTKPREEQYNSTYRVVSVLTVLHQDWLNGKEYKCKVSNKALPAPIEKTISKAKGQPREPQVYTLPPSREEMTKNQVSLTCLVKGFYPSDIAVEWESNGQPENNYKTTPPVLDSDGSFFLRSKLTVDKSRWQQGNVFSCSVMHEALHNHYTQKSLSLSPGK

SEQ ID NO: 280 - DNA, 702 bp, Artificial Sequence
  Human IgG1 Fc F405Q sequence
gagcccaaatcttgtgacaaaactcacacatgcccaccgtgcccagcacctgaactcctggggggaccgtcagtcttcctcttccccccaaaacccaaggacaccctcatgatctcccggacccctgaggtcacatgcgtggtggtggacgtgagccacgaagaccctgaggtcaagttcaactggtacgtggacggcgtggaggtgcataatgccaagacaaagccgcgggaggagcagtacaacagcacgtaccgtgtggtcagcgtcctcaccgtcctgcaccaggactggctgaatggcaaggagtacaagtgcaaggtctccaacaaagccctcccagcccccatcgagaaaaccatctccaaagccaaagggcagccccgagaaccacaggtgtacaccctgcccccatcccgggaggagatgaccaagaaccaggtcagcctgacctgcctggtcaaaggcttctatcccagcgacatcgccgtggagtgggagagcaatgggcagccggagaacaactacaagaccacgcctcccgtgctggactccgacggctccttccagctctacagcaagctcaccgtggacaagagcaggtggcagcaggggaacgtcttctcatgctccgtgatgcatgaggctctgcacaaccactacacgcagaagagcctctccctgtctccgggtaaatgataa

SEQ ID NO: 281 - protein, 232 aa, Artificial Sequence
  Human IgG1 Fc F405Q sequence
EPKSCDKTHTCPPCPAPELLGGPSVFLFPPKPKDTLMISRTPEVTCVVVDVSHEDPEVKFNWYVDGVEVHNAKTKPREEQYNSTYRVVSVLTVLHQDWLNGKEYKCKVSNKALPAPIEKTISKAKGQPREPQVYTLPPSREEMTKNQVSLTCLVKGFYPSDIAVEWESNGQPENNYKTTPPVLDSDGSFQLYSKLTVDKSRWQQGNVFSCSVMHEALHNHYTQKSLSLSPGK

SEQ ID NO: 282 - DNA, 702 bp, Artificial Sequence
  Human IgG1 Fc T394D sequence
gagcccaaatcttgtgacaaaactcacacatgcccaccgtgcccagcacctgaactcctggggggaccgtcagtcttcctcttccccccaaaacccaaggacaccctcatgatctcccggacccctgaggtcacatgcgtggtggtggacgtgagccacgaagaccctgaggtcaagttcaactggtacgtggacggcgtggaggtgcataatgccaagacaaagccgcgggaggagcagtacaacagcacgtaccgtgtggtcagcgtcctcaccgtcctgcaccaggactggctgaatggcaaggagtacaagtgcaaggtctccaacaaagccctcccagcccccatcgagaaaaccatctccaaagccaaagggcagccccgagaaccacaggtgtacaccctgcccccatcccgggaggagatgaccaagaaccaggtcagcctgacctgcctggtcaaaggcttctatcccagcgacatcgccgtggagtgggagagcaatgggcagccggagaacaactacaagaccgaccctcccgtgctggactccgacggctccttcttcctctacagcaagctcaccgtggacaagagcaggtggcagcaggggaacgtcttctcatgctccgtgatgcatgaggctctgcacaaccactacacgcagaagagcctctccctgtctccgggtaaatgataa

SEQ ID NO: 283 - protein, 232 aa, Artificial Sequence
  Human IgG1 Fc T394D sequence
EPKSCDKTHTCPPCPAPELLGGPSVFLFPPKPKDTLMISRTPEVTCVVVDVSHEDPEVKFNWYVDGVEVHNAKTKPREEQYNSTYRVVSVLTVLHQDWLNGKEYKCKVSNKALPAPIEKTISKAKGQPREPQVYTLPPSREEMTKNQVSLTCLVKGFYPSDIAVEWESNGQPENNYKTDPPVLDSDGSFFLYSKLTVDKSRWQQGNVFSCSVMHEALHNHYTQKSLSLSPGK

SEQ ID NO: 284 - DNA, 702 bp, Artificial Sequence
  Human IgG1 Fc T366W/L368W sequence
gagcccaaatcttgtgacaaaactcacacatgcccaccgtgcccagcacctgaactcctggggggaccgtcagtcttcctcttccccccaaaacccaaggacaccctcatgatctcccggacccctgaggtcacatgcgtggtggtggacgtgagccacgaagaccctgaggtcaagttcaactggtacgtggacggcgtggaggtgcataatgccaagacaaagccgcgggaggagcagtacaacagcacgtaccgtgtggtcagcgtcctcaccgtcctgcaccaggactggctgaatggcaaggagtacaagtgcaaggtctccaacaaagccctcccagcccccatcgagaaaaccatctccaaagccaaagggcagccccgagaaccacaggtgtacaccctgcccccatcccgggaggagatgaccaagaaccaggtcagcctgtggtgctgggtcaaaggcttctatcccagcgacatcgccgtggagtgggagagcaatgggcagccggagaacaactacaagaccacgcctcccgtgctggactccgacggctccttcttcctctacagcaagctcaccgtggacaagagcaggtggcagcaggggaacgtcttctcatgctccgtgatgcatgaggctctgcacaaccactacacgcagaagagcctctccctgtctccgggtaaatgataa

SEQ ID NO: 285 - protein, 232 aa, Artificial Sequence
  Human IgG1 Fc T366W/L368W sequence
EPKSCDKTHTCPPCPAPELLGGPSVFLFPPKPKDTLMISRTPEVTCVVVDVSHEDPEVKFNWYVDGVEVHNAKTKPREEQYNSTYRVVSVLTVLHQDWLNGKEYKCKVSNKALPAPIEKTISKAKGQPREPQVYTLPPSREEMTKNQVSLWCWVKGFYPSDIAVEWESNGQPENNYKTTPPVLDSDGSFFLYSKLTVDKSRWQQGNVFSCSVMHEALHNHYTQKSLSLSPGK

SEQ ID NO: 286 - DNA, 702 bp, Artificial Sequence
  Human IgG1 Fc T364R/L368R sequence
gagcccaaatcttgtgacaaaactcacacatgcccaccgtgcccagcacctgaactcctggggggaccgtcagtcttcctcttccccccaaaacccaaggacaccctcatgatctcccggacccctgaggtcacatgcgtggtggtggacgtgagccacgaagaccctgaggtcaagttcaactggtacgtggacggcgtggaggtgcataatgccaagacaaagccgcgggaggagcagtacaacagcacgtaccgtgtggtcagcgtcctcaccgtcctgcaccaggactggctgaatggcaaggagtacaagtgcaaggtctccaacaaagccctcccagcccccatcgagaaaaccatctccaaagccaaagggcagccccgagaaccacaggtgtacaccctgcccccatcccgggaggagatgaccaagaaccaggtcaggctgacctgcagggtcaaaggcttctatcccagcgacatcgccgtggagtgggagagcaatgggcagccggagaacaactacaagaccacgcctcccgtgctggactccgacggctccttcttcctctacagcaagctcaccgtggacaagagcaggtggcagcaggggaacgtcttctcatgctccgtgatgcatgaggctctgcacaaccactacacgcagaagagcctctccctgtctccgggtaaatgataa

SEQ ID NO: 287 - protein, 232 aa, Artificial Sequence
  Human IgG1 Fc T364R/L368R sequence
EPKSCDKTHTCPPCPAPELLGGPSVFLFPPKPKDTLMISRTPEVTCVVVDVSHEDPEVKFNWYVDGVEVHNAKTKPREEQYNSTYRVVSVLTVLHQDWLNGKEYKCKVSNKALPAPIEKTISKAKGQPREPQVYTLPPSREEMTKNQVRLTCRVKGFYPSDIAVEWESNGQPENNYKTTPPVLDSDGSFFLYSKLTVDKSRWQQGNVFSCSVMHEALHNHYTQKSLSLSPGK

SEQ ID NO: 288 - DNA, 657 bp, Artificial Sequence
  Human IgG1 Fc hingeless sequence
gcacctgaactcctggggggaccgtcagtcttcctcttccccccaaaacccaaggacaccctcatgatctcccggacccctgaggtcacatgcgtggtggtggacgtgagccacgaagaccctgaggtcaagttcaactggtacgtggacggcgtggaggtgcataatgccaagacaaagccgcgggaggagcagtacaacagcacgtaccgtgtggtcagcgtcctcaccgtcctgcaccaggactggctgaatggcaaggagtacaagtgcaaggtctccaacaaagccctcccagcccccatcgagaaaaccatctccaaagccaaagggcagccccgagaaccacaggtgtacaccctgcccccatcccgggaggagatgaccaagaaccaggtcagcctgacctgcctggtcaaaggcttctatcccagcgacatcgccgtggagtgggagagcaatgggcagccggagaacaactacaagaccacgcctcccgtgctggactccgacggctccttcttcctctacagcaagctcaccgtggacaagagcaggtggcagcaggggaacgtcttctcatgctccgtgatgcatgaggctctgcacaaccactacacgcagaagagcctctccctgtctccgggtaaatgataa

SEQ ID NO: 289 - protein, 217 aa, Artificial Sequence
  Human IgG1 Fc hingeless sequence
APELLGGPSVFLFPPKPKDTLMISRTPEVTCVVVDVSHEDPEVKFNWYVDGVEVHNAKTKPREEQYNSTYRVVSVLTVLHQDWLNGKEYKCKVSNKALPAPIEKTISKAKGQPREPQVYTLPPSREEMTKNQVSLTCLVKGFYPSDIAVEWESNGQPENNYKTTPPVLDSDGSFFLYSKLTVDKSRWQQGNVFSCSVMHEALHNHYTQKSLSLSPGK

SEQ ID NO: 290 - DNA, 696 bp, Artificial Sequence
  Human IgG1 G237A FC sequence
gagcccaaatcttgtgacaaaactcacacatgcccaccgtgcccagcacctgaactcctgggggccccgtcagtcttcctcttccccccaaaacccaaggacaccctcatgatctcccggacccctgaggtcacatgcgtggtggtggacgtgagccacgaagaccctgaggtcaagttcaactggtacgtggacggcgtggaggtgcataatgccaagacaaagccgcgggaggagcagtacaacagcacgtaccgtgtggtcagcgtcctcaccgtcctgcaccaggactggctgaatggcaaggagtacaagtgcaaggtctccaacaaagccctcccagcccccatcgagaaaaccatctccaaagccaaagggcagccccgagaaccacaggtgtacaccctgcccccatcccgggaggagatgaccaagaaccaggtcagcctgacctgcctggtcaaaggcttctatcccagcgacatcgccgtggagtgggagagcaatgggcagccggagaacaactacaagaccacgcctcccgtgctggactccgacggctccttcttcctctacagcaagctcaccgtggacaagagcaggtggcagcaggggaacgtcttctcatgctccgtgatgcatgaggctctgcacaaccactacacgcagaagagcctctccctgtctccgggtaaa

SEQ ID NO: 291 - protein, 232 aa, Artificial Sequence
  Human IgG1 G237A FC sequence
EPKSCDKTHTCPPCPAPELLGAPSVFLFPPKPKDTLMISRTPEVTCVVVDVSHEDPEVKFNWYVDGVEVHNAKTKPREEQYNSTYRVVSVLTVLHQDWLNGKEYKCKVSNKALPAPIEKTISKAKGQPREPQVYTLPPSREEMTKNQVSLTCLVKGFYPSDIAVEWESNGQPENNYKTTPPVLDSDGSFFLYSKLTVDKSRWQQGNVFSCSVMHEALHNHYTQKSLSLSPGK

SEQ ID NO: 292 - DNA, 696 bp, Artificial Sequence
  Human IgG1 L234A/L235A FC sequence
gagcccaaatcttgtgacaaaactcacacatgcccaccgtgcccagcacctgaagccgccgggggaccgtcagtcttcctcttccccccaaaacccaaggacaccctcatgatctcccggacccctgaggtcacatgcgtggtggtggacgtgagccacgaagaccctgaggtcaagttcaactggtacgtggacggcgtggaggtgcataatgccaagacaaagccgcgggaggagcagtacaacagcacgtaccgtgtggtcagcgtcctcaccgtcctgcaccaggactggctgaatggcaaggagtacaagtgcaaggtctccaacaaagccctcccagcccccatcgagaaaaccatctccaaagccaaagggcagccccgagaaccacaggtgtacaccctgcccccatcccgggaggagatgaccaagaaccaggtcagcctgacctgcctggtcaaaggcttctatcccagcgacatcgccgtggagtgggagagcaatgggcagccggagaacaactacaagaccacgcctcccgtgctggactccgacggctccttcttcctctacagcaagctcaccgtggacaagagcaggtggcagcaggggaacgtcttctcatgctccgtgatgcatgaggctctgcacaaccactacacgcagaagagcctctccctgtctccgggtaaa

SEQ ID NO: 293 - protein, 232 aa, Artificial Sequence
  Human IgG1 L234A/L235A FC sequence
EPKSCDKTHTCPPCPAPEAAGGPSVFLFPPKPKDTLMISRTPEVTCVVVDVSHEDPEVKFNWYVDGVEVHNAKTKPREEQYNSTYRVVSVLTVLHQDWLNGKEYKCKVSNKALPAPIEKTISKAKGQPREPQVYTLPPSREEMTKNQVSLTCLVKGFYPSDIAVEWESNGQPENNYKTTPPVLDSDGSFFLYSKLTVDKSRWQQGNVFSCSVMHEALHNHYTQKSLSLSPGK

SEQ ID NO: 294 - DNA, 1341 bp, Artificial Sequence
  CAR-T E6 CD3z sequence
atggccctgcccgtgaccgctttgctgctccccctggcgctgctgctgcacgccgccaggccagaggtccagctggttgagagtggcggtgggctggttaagcctggcggctccctgcggctgagctgcgccgcgagtggatttactttcagccgatatgggatgagttgggtgcggcaagctcccgggaagaggctggaatgggtctcaacaatctccggggggggcacttacatctattaccccgactcagtcaaggggagatttaccatttcacgagacaacgctaagaataccctgtatttgcagatgaattctctgagagcagaggacacagctgtttactattgtacccgcgacaactatggcaggaactacgactacggtatggactattggggacaagggacattggttacagtgagcagtggcggcgggggcagcggaggaggaggcagcggtggggggggcagcgagatagtgctcacgcagtcacccgcgactctcagtctctcacctggggaacgagctaccctgacgtgctctgctacctcctcagtgtcatatattcactggtatcagcaacggcccgggcagtcccctagattgctcatttatagtacctctaatctggcctcaggtatccctgcacgattttctggatctggttcaggttctgattacaccctcactatctctagcctggagcctgaagactttgccgtttattactgccagcagaggtctagctccccattcacctttgggagtgggaccaaggttgaaattaaaacgacaaccccggcccccagaccaccaacgccagcccccaccatcgccagccaacccctgtctctgagaccagaagcctgtaggcctgccgccggtggagctgtgcacacaagaggactggatttcgcctgtgatatctacatttgggccccgctcgcaggcacatgtggagtgctcctcctctccctggtgattaccctgtactgccgcgttaagttctcccgatcagccgacgcgcctgcttacaagcagggccagaaccaactgtacaacgagctgaatctcggtagacgggaagagtacgacgtgttggacaaacggagaggccgcgacccagaaatgggcggcaagcctcgcaggaaaaacccccaggagggactgtacaatgagttgcagaaagataagatggcagaagcttatagcgagatcggaatgaagggggaaaggagacgagggaaaggacacgacggcctttatcagggcctgtccacagcaacaaaagatacgtatgacgccctccatatgcaggcacttccaccacggtgataa

SEQ ID NO: 295 - protein, 445 aa, Artificial Sequence
  CAR-T E6 CD3z sequence
MALPVTALLLPLALLLHAARPEVQLVESGGGLVKPGGSLRLSCAASGFTFSRYGMSWVRQAPGKRLEWVSTISGGGTYIYYPDSVKGRFTISRDNAKNTLYLQMNSLRAEDTAVYYCTRDNYGRNYDYGMDYWGQGTLVTVSSGGGGSGGGGSGGGGSEIVLTQSPATLSLSPGERATLTCSATSSVSYIHWYQQRPGQSPRLLIYSTSNLASGIPARFSGSGSGSDYTLTISSLEPEDFAVYYCQQRSSSPFTFGSGTKVEIKTTTPAPRPPTPAPTIASQPLSLRPEACRPAAGGAVHTRGLDFACDIYIWAPLAGTCGVLLLSLVITLYCRVKFSRSADAPAYKQGQNQLYNELNLGRREEYDVLDKRRGRDPEMGGKPRRKNPQEGLYNELQKDKMAEAYSEIGMKGERRRGKGHDGLYQGLSTATKDTYDALHMQALPPR

SEQ ID NO: 296 - DNA, 485 bp, Artificial Sequence
  CAR-T E6 CD3z gBLOCK sequence
tggagctgtgcacacaagaggactggatttcgcctgtgatatctacatttgggccccgctcgcaggcacatgtggagtgctcctcctctccctggtgattaccctgtactgccgcgttaagttctcccgatcagccgacgcgcctgcttacaagcagggccagaaccaactgtacaacgagctgaatctcggtagacgggaagagtacgacgtgttggacaaacggagaggccgcgacccagaaatgggcggcaagcctcgcaggaaaaacccccaggagggactgtacaatgagttgcagaaagataagatggcagaagcttatagcgagatcggaatgaagggggaaaggagacgagggaaaggacacgacggcctttatcagggcctgtccacagcaacaaaagatacgtatgacgccctccatatgcaggcacttccaccacggtgataagtttaaacccgctgatcagcctcgactgtgc

SEQ ID NO: 297 - DNA, 1464 bp, Artificial Sequence
  CAR-T E6 CD28/CD3z sequence
atggccctgcccgtgaccgctttgctgctccccctggcgctgctgctgcacgccgccaggccagaggtccagctggttgagagtggcggtgggctggttaagcctggcggctccctgcggctgagctgcgccgcgagtggatttactttcagccgatatgggatgagttgggtgcggcaagctcccgggaagaggctggaatgggtctcaacaatctccggggggggcacttacatctattaccccgactcagtcaaggggagatttaccatttcacgagacaacgctaagaataccctgtatttgcagatgaattctctgagagcagaggacacagctgtttactattgtacccgcgacaactatggcaggaactacgactacggtatggactattggggacaagggacattggttacagtgagcagtggcggcgggggcagcggaggaggaggcagcggtggggggggcagcgagatagtgctcacgcagtcacccgcgactctcagtctctcacctggggaacgagctaccctgacgtgctctgctacctcctcagtgtcatatattcactggtatcagcaacggcccgggcagtcccctagattgctcatttatagtacctctaatctggcctcaggtatccctgcacgattttctggatctggttcaggttctgattacaccctcactatctctagcctggagcctgaagactttgccgtttattactgccagcagaggtctagctccccattcacctttgggagtgggaccaaggttgaaattaaaacgacaaccccggcccccagaccaccaacgccagcccccaccatcgccagccaacccctgtctctgagaccagaagcctgtaggcctgccgccggtggagctgtgcacacaagaggactggatttcgcctgtgatatctacatttgggccccgctcgcaggcacatgtggagtgctcctcctctccctggtgattaccctgtactgcagaagcaagcggtctcggctcctgcattctgattacatgaacatgaccccaagaagaccaggccccaccaggaaacattaccagccctacgctccgccacgcgacttcgctgcctaccggtcccgcgttaagttctcccgatcagccgacgcgcctgcttacaagcagggccagaaccaactgtacaacgagctgaatctcggtagacgggaagagtacgacgtgttggacaaacggagaggccgcgacccagaaatgggcggcaagcctcgcaggaaaaacccccaggagggactgtacaatgagttgcagaaagataagatggcagaagcttatagcgagatcggaatgaagggggaaaggagacgagggaaaggacacgacggcctttatcagggcctgtccacagcaacaaaagatacgtatgacgccctccatatgcaggcacttccaccacggtgataa

SEQ ID NO: 298 - protein, 486 aa, Artificial Sequence
  CAR-T E6 CD28/CD3z sequence
MALPVTALLLPLALLLHAARPEVQLVESGGGLVKPGGSLRLSCAASGFTFSRYGMSWVRQAPGKRLEWVSTISGGGTYIYYPDSVKGRFTISRDNAKNTLYLQMNSLRAEDTAVYYCTRDNYGRNYDYGMDYWGQGTLVTVSSGGGGSGGGGSGGGGSEIVLTQSPATLSLSPGERATLTCSATSSVSYIHWYQQRPGQSPRLLIYSTSNLASGIPARFSGSGSGSDYTLTISSLEPEDFAVYYCQQRSSSPFTFGSGTKVEIKTTTPAPRPPTPAPTIASQPLSLRPEACRPAAGGAVHTRGLDFACDIYIWAPLAGTCGVLLLSLVITLYCRSKRSRLLHSDYMNMTPRRPGPTRKHYQPYAPPRDFAAYRSRVKFSRSADAPAYKQGQNQLYNELNLGRREEYDVLDKRRGRDPEMGGKPRRKNPQEGLYNELQKDKMAEAYSEIGMKGERRRGKGHDGLYQGLSTATKDTYDALHMQALPPR

SEQ ID NO: 299 - DNA, 608 bp, Artificial Sequence
  CAR-T E6 CD28/CD3z g BLOCK sequence
tggagctgtgcacacaagaggactggatttcgcctgtgatatctacatttgggccccgctcgcaggcacatgtggagtgctcctcctctccctggtgattaccctgtactgcagaagcaagcggtctcggctcctgcattctgattacatgaacatgaccccaagaagaccaggccccaccaggaaacattaccagccctacgctccgccacgcgacttcgctgcctaccggtcccgcgttaagttctcccgatcagccgacgcgcctgcttacaagcagggccagaaccaactgtacaacgagctgaatctcggtagacgggaagagtacgacgtgttggacaaacggagaggccgcgacccagaaatgggcggcaagcctcgcaggaaaaacccccaggagggactgtacaatgagttgcagaaagataagatggcagaagcttatagcgagatcggaatgaagggggaaaggagacgagggaaaggacacgacggcctttatcagggcctgtccacagcaacaaaagatacgtatgacgccctccatatgcaggcacttccaccacggtgataagtttaaacccgctgatcagcctcgactgtgc

SEQ ID NO: 300 - DNA, 1467 bp, Artificial Sequence
  CAR-T E6 4-1BB/CD3z sequence
atggccctgcccgtgaccgctttgctgctccccctggcgctgctgctgcacgccgccaggccagaggtccagctggttgagagtggcggtgggctggttaagcctggcggctccctgcggctgagctgcgccgcgagtggatttactttcagccgatatgggatgagttgggtgcggcaagctcccgggaagaggctggaatgggtctcaacaatctccggggggggcacttacatctattaccccgactcagtcaaggggagatttaccatttcacgagacaacgctaagaataccctgtatttgcagatgaattctctgagagcagaggacacagctgtttactattgtacccgcgacaactatggcaggaactacgactacggtatggactattggggacaagggacattggttacagtgagcagtggcggcgggggcagcggaggaggaggcagcggtggggggggcagcgagatagtgctcacgcagtcacccgcgactctcagtctctcacctggggaacgagctaccctgacgtgctctgctacctcctcagtgtcatatattcactggtatcagcaacggcccgggcagtcccctagattgctcatttatagtacctctaatctggcctcaggtatccctgcacgattttctggatctggttcaggttctgattacaccctcactatctctagcctggagcctgaagactttgccgtttattactgccagcagaggtctagctccccattcacctttgggagtgggaccaaggttgaaattaaaacgacaaccccggcccccagaccaccaacgccagcccccaccatcgccagccaacccctgtctctgagaccagaagcctgtaggcctgccgccggtggagctgtgcacacaagaggactggatttcgcctgtgatatctacatttgggccccgctcgcaggcacatgtggagtgctcctcctctccctggtgattaccctgtactgcaaaaggggccgcaaaaaactcctttacatttttaagcagccttttatgaggccagtacagacgactcaagaggaagacgggtgctcatgccgctttcctgaggaggaggaaggagggtgcgaactgcgcgttaagttctcccgatcagccgacgcgcctgcttacaagcagggccagaaccaactgtacaacgagctgaatctcggtagacgggaagagtacgacgtgttggacaaacggagaggccgcgacccagaaatgggcggcaagcctcgcaggaaaaacccccaggagggactgtacaatgagttgcagaaagataagatggcagaagcttatagcgagatcggaatgaagggggaaaggagacgagggaaaggacacgacggcctttatcagggcctgtccacagcaacaaaagatacgtatgacgccctccatatgcaggcacttccaccacggtgataa

SEQ ID NO: 301 - protein, 487 aa, Artificial Sequence
  CAR-T E6 4-1BB/CD3z sequence
MALPVTALLLPLALLLHAARPEVQLVESGGGLVKPGGSLRLSCAASGFTFSRYGMSWVRQAPGKRLEWVSTISGGGTYIYYPDSVKGRFTISRDNAKNTLYLQMNSLRAEDTAVYYCTRDNYGRNYDYGMDYWGQGTLVTVSSGGGGSGGGGSGGGGSEIVLTQSPATLSLSPGERATLTCSATSSVSYIHWYQQRPGQSPRLLIYSTSNLASGIPARFSGSGSGSDYTLTISSLEPEDFAVYYCQQRSSSPFTFGSGTKVEIKTTTPAPRPPTPAPTIASQPLSLRPEACRPAAGGAVHTRGLDFACDIYIWAPLAGTCGVLLLSLVITLYCKRGRKKLLYIFKQPFMRPVQTTQEEDGCSCRFPEEEEGGCELRVKFSRSADAPAYKQGQNQLYNELNLGRREEYDVLDKRRGRDPEMGGKPRRKNPQEGLYNELQKDKMAEAYSEIGMKGERRRGKGHDGLYQGLSTATKDTYDALHMQALPPR

SEQ ID NO: 302 - DNA, 611 bp, Artificial Sequence
  CAR-T E6 4-1BB/CD3z gBLOCK sequence
tggagctgtgcacacaagaggactggatttcgcctgtgatatctacatttgggccccgctcgcaggcacatgtggagtgctcctcctctccctggtgattaccctgtactgcaaaaggggccgcaaaaaactcctttacatttttaagcagccttttatgaggccagtacagacgactcaagaggaagacgggtgctcatgccgctttcctgaggaggaggaaggagggtgcgaactgcgcgttaagttctcccgatcagccgacgcgcctgcttacaagcagggccagaaccaactgtacaacgagctgaatctcggtagacgggaagagtacgacgtgttggacaaacggagaggccgcgacccagaaatgggcggcaagcctcgcaggaaaaacccccaggagggactgtacaatgagttgcagaaagataagatggcagaagcttatagcgagatcggaatgaagggggaaaggagacgagggaaaggacacgacggcctttatcagggcctgtccacagcaacaaaagatacgtatgacgccctccatatgcaggcacttccaccacggtgataagtttaaacccgctgatcagcctcgactgtgc

SEQ ID NO: 303 - DNA, 1590 bp, Artificial Sequence
  CAR-T E6 CD28/4-1BB/CD3z sequence
atggccctgcccgtgaccgctttgctgctccccctggcgctgctgctgcacgccgccaggccagaggtccagctggttgagagtggcggtgggctggttaagcctggcggctccctgcggctgagctgcgccgcgagtggatttactttcagccgatatgggatgagttgggtgcggcaagctcccgggaagaggctggaatgggtctcaacaatctccggggggggcacttacatctattaccccgactcagtcaaggggagatttaccatttcacgagacaacgctaagaataccctgtatttgcagatgaattctctgagagcagaggacacagctgtttactattgtacccgcgacaactatggcaggaactacgactacggtatggactattggggacaagggacattggttacagtgagcagtggcggcgggggcagcggaggaggaggcagcggtggggggggcagcgagatagtgctcacgcagtcacccgcgactctcagtctctcacctggggaacgagctaccctgacgtgctctgctacctcctcagtgtcatatattcactggtatcagcaacggcccgggcagtcccctagattgctcatttatagtacctctaatctggcctcaggtatccctgcacgattttctggatctggttcaggttctgattacaccctcactatctctagcctggagcctgaagactttgccgtttattactgccagcagaggtctagctccccattcacctttgggagtgggaccaaggttgaaattaaaacgacaaccccggcccccagaccaccaacgccagcccccaccatcgccagccaacccctgtctctgagaccagaagcctgtaggcctgccgccggtggagctgtgcacacaagaggactggatttcgcctgtgatatctacatttgggccccgctcgcaggcacatgtggagtgctcctcctctccctggtgattaccctgtactgcagaagcaagcggtctcggctcctgcattctgattacatgaacatgaccccaagaagaccaggccccaccaggaaacattaccagccctacgctccgccacgcgacttcgctgcctaccggtccaaaaggggccgcaaaaaactcctttacatttttaagcagccttttatgaggccagtacagacgactcaagaggaagacgggtgctcatgccgctttcctgaggaggaggaaggagggtgcgaactgcgcgttaagttctcccgatcagccgacgcgcctgcttacaagcagggccagaaccaactgtacaacgagctgaatctcggtagacgggaagagtacgacgtgttggacaaacggagaggccgcgacccagaaatgggcggcaagcctcgcaggaaaaacccccaggagggactgtacaatgagttgcagaaagataagatggcagaagcttatagcgagatcggaatgaagggggaaaggagacgagggaaaggacacgacggcctttatcagggcctgtccacagcaacaaaagatacgtatgacgccctccatatgcaggcacttccaccacggtgataa

SEQ ID NO: 304 - protein, 528 aa, Artificial Sequence
  CAR-T E6 CD28/4-1BB/CD3z sequence
MALPVTALLLPLALLLHAARPEVQLVESGGGLVKPGGSLRLSCAASGFTFSRYGMSWVRQAPGKRLEWVSTISGGGTYIYYPDSVKGRFTISRDNAKNTLYLQMNSLRAEDTAVYYCTRDNYGRNYDYGMDYWGQGTLVTVSSGGGGSGGGGSGGGGSEIVLTQSPATLSLSPGERATLTCSATSSVSYIHWYQQRPGQSPRLLIYSTSNLASGIPARFSGSGSGSDYTLTISSLEPEDFAVYYCQQRSSSPFTFGSGTKVEIKTTTPAPRPPTPAPTIASQPLSLRPEACRPAAGGAVHTRGLDFACDIYIWAPLAGTCGVLLLSLVITLYCRSKRSRLLHSDYMNMTPRRPGPTRKHYQPYAPPRDFAAYRSKRGRKKLLYIFKQPFMRPVQTTQEEDGCSCRFPEEEEGGCELRVKFSRSADAPAYKQGQNQLYNELNLGRREEYDVLDKRRGRDPEMGGKPRRKNPQEGLYNELQKDKMAEAYSEIGMKGERRRGKGHDGLYQGLSTATKDTYDALHMQALPPR

SEQ ID NO: 305 - DNA, 1668 bp, Artificial Sequence
  CAR-T E6 CD28/4-1BB/CD3z gBLOCK sequence
atagggagacccaagctggctagttaagcttggtaccgagggccaccatggccctgcccgtgaccgctttgctgctccccctggcgctgctgctgcacgccgccaggccagaggtccagctggttgagagtggcggtgggctggttaagcctggcggctccctgcggctgagctgcgccgcgagtggatttactttcagccgatatgggatgagttgggtgcggcaagctcccgggaagaggctggaatgggtctcaacaatctccggggggggcacttacatctattaccccgactcagtcaaggggagatttaccatttcacgagacaacgctaagaataccctgtatttgcagatgaattctctgagagcagaggacacagctgtttactattgtacccgcgacaactatggcaggaactacgactacggtatggactattggggacaagggacattggttacagtgagcagtggcggcgggggcagcggaggaggaggcagcggtggggggggcagcgagatagtgctcacgcagtcacccgcgactctcagtctctcacctggggaacgagctaccctgacgtgctctgctacctcctcagtgtcatatattcactggtatcagcaacggcccgggcagtcccctagattgctcatttatagtacctctaatctggcctcaggtatccctgcacgattttctggatctggttcaggttctgattacaccctcactatctctagcctggagcctgaagactttgccgtttattactgccagcagaggtctagctccccattcacctttgggagtgggaccaaggttgaaattaaaacgacaaccccggcccccagaccaccaacgccagcccccaccatcgccagccaacccctgtctctgagaccagaagcctgtaggcctgccgccggtggagctgtgcacacaagaggactggatttcgcctgtgatatctacatttgggccccgctcgcaggcacatgtggagtgctcctcctctccctggtgattaccctgtactgcagaagcaagcggtctcggctcctgcattctgattacatgaacatgaccccaagaagaccaggccccaccaggaaacattaccagccctacgctccgccacgcgacttcgctgcctaccggtccaaaaggggccgcaaaaaactcctttacatttttaagcagccttttatgaggccagtacagacgactcaagaggaagacgggtgctcatgccgctttcctgaggaggaggaaggagggtgcgaactgcgcgttaagttctcccgatcagccgacgcgcctgcttacaagcagggccagaaccaactgtacaacgagctgaatctcggtagacgggaagagtacgacgtgttggacaaacggagaggccgcgacccagaaatgggcggcaagcctcgcaggaaaaacccccaggagggactgtacaatgagttgcagaaagataagatggcagaagcttatagcgagatcggaatgaagggggaaaggagacgagggaaaggacacgacggcctttatcagggcctgtccacagcaacaaaagatacgtatgacgccctccatatgcaggcacttccaccacggtgataagtttaaacccgctgatcagcctcgactgtgc

SEQ ID NO: 306 - DNA, 1608 bp, Artificial Sequence
  CAR-T C2 CD28/4-1BB/CD3z sequence
atggccttgccagtgacggccctgctgctgccattggctcttctgttgcacgctgccaggcctgaagtgcagctcgtagagagtggcgggggactggtgaagcccggtggaagcctcagactcagttgcgccgcctcaggtttcactttttcaggttacgccatgtcctgggtaagacaggcaccggggaaaggactcgagtgggtgtctactatcagctcaggaggcacttatatatattatcctgactctgtaaaaggccgatttacgatttctcgcgacaatgcaaagaactccctctacctccaaatgaacagtcttagggcagaagacactgctgtatactattgtgcacgcctcggcggcgacaactactacgagtactttgacgtgtgggggaaagggactaccgtgacagtttcaagcggaggaggtggctcaggtggaggcgggtcaggggggggaggaagtgatattgtgctcacacaatccccagcctccctggctgtgtctcccggccaacgcgctacaattacatgtcgggcctccaaaagcgtgagcaccagcggctacagctacatgcactggtatcaacagaaaccaggacaaccccccaaactgttgatttatctcgcttcaaacttggagtccggcgtgcctgcgcgcttttcagggagtgggagcggcacagattttacgctgactatcaaccccgtagaagcaaacgatacagcgaattattattgtcaacattcccgggaactcccctttacgttcggcgggggcacaaaggtcgaaattaagagaaccacgacaaccccggcccccagaccaccaacgccagcccccaccatcgccagccaacccctgtctctgagaccagaagcctgtaggcctgccgccggtggagctgtgcacacaagaggactggatttcgcctgtgatatctacatttgggccccgctcgcaggcacatgtggagtgctcctcctctccctggtgattaccctgtactgcagaagcaagcggtctcggctcctgcattctgattacatgaacatgaccccaagaagaccaggccccaccaggaaacattaccagccctacgctccgccacgcgacttcgctgcctaccggtccaaaaggggccgcaaaaaactcctttacatttttaagcagccttttatgaggccagtacagacgactcaagaggaagacgggtgctcatgccgctttcctgaggaggaggaaggagggtgcgaactgcgcgttaagttctcccgatcagccgacgcgcctgcttacaagcagggccagaaccaactgtacaacgagctgaatctcggtagacgggaagagtacgacgtgttggacaaacggagaggccgcgacccagaaatgggcggcaagcctcgcaggaaaaacccccaggagggactgtacaatgagttgcagaaagataagatggcagaagcttatagcgagatcggaatgaagggggaaaggagacgagggaaaggacacgacggcctttatcagggcctgtccacagcaacaaaagatacgtatgacgccctccatatgcaggcacttccaccacggtgataa

SEQ ID NO: 307 - protein, 513 aa, Artificial Sequence
  CAR-T C2 CD28/4-1BB/CD3z sequence
EVQLVESGGGLVKPGGSLRLSCAASGFTFSGYAMSWVRQAPGKGLEWVSTISSGGTYIYYPDSVKGRFTISRDNAKNSLYLQMNSLRAEDTAVYYCARLGGDNYYEYFDVWGKGTTVTVSSGGGGSGGGGSGGGGSDIVLTQSPASLAVSPGQRATITCRASKSVSTSGYSYMHWYQQKPGQPPKLLIYLASNLESGVPARFSGSGSGTDFTLTINPVEANDTANYYCQHSRELPFTFGGGTKVEIKRTTTTPAPRPPTPAPTIASQPLSLRPEACRPAAGGAVHTRGLDFACDIYIWAPLAGTCGVLLLSLVITLYCRSKRSRLLHSDYMNMTPRRPGPTRKHYQPYAPPRDFAAYRSKRGRKKLLYIFKQPFMRPVQTTQEEDGCSCRFPEEEEGGCELRVKFSRSADAPAYKQGQNQLYNELNLGRREEYDVLDKRRGRDPEMGGKPRRKNPQEGLYNELQKDKMAEAYSEIGMKGERRRGKGHDGLYQGLSTATKDTYDALHMQALPPR

SEQ ID NO: 308 - DNA, 553 bp, Artificial Sequence
  CAR-T C2-1 gBLOCK sequence
atagggagacccaagctggctagttaagcttggtaccgagggccaccatggccttgccagtgacggccctgctgctgccattggctcttctgttgcacgctgccaggcctgaagtgcagctcgtagagagtggcgggggactggtgaagcccggtggaagcctcagactcagttgcgccgcctcaggtttcactttttcaggttacgccatgtcctgggtaagacaggcaccggggaaaggactcgagtgggtgtctactatcagctcaggaggcacttatatatattatcctgactctgtaaaaggccgatttacgatttctcgcgacaatgcaaagaactccctctacctccaaatgaacagtcttagggcagaagacactgctgtatactattgtgcacgcctcggcggcgacaactactacgagtactttgacgtgtgggggaaagggactaccgtgacagtttcaagcggaggaggtggctcaggtggaggcgggtcaggggggggaggaagtgatattgtgctcacacaatccccagcctccctggc

SEQ ID NO: 309 - DNA, 518 bp, Artificial Sequence
  CAR-T C2-2 gBLOCK sequence
aagtgatattgtgctcacacaatccccagcctccctggctgtgtctcccggccaacgcgctacaattacatgtcgggcctccaaaagcgtgagcaccagcggctacagctacatgcactggtatcaacagaaaccaggacaaccccccaaactgttgatttatctcgcttcaaacttggagtccggcgtgcctgcgcgcttttcagggagtgggagcggcacagattttacgctgactatcaaccccgtagaagcaaacgatacagcgaattattattgtcaacattcccgggaactcccctttacgttcggcgggggcacaaaggtcgaaattaagagaaccacgacaaccccggcccccagaccaccaacgccagcccccaccatcgccagccaacccctgtctctgagaccagaagcctgtaggcctgccgccggtggagctgtgcacacaagaggactggatttcgcctgtgatatctacatttgggccccgctcgcaggcacatgtggagtgc

SEQ ID NO: 310 - DNA, 2028 bp, Artificial Sequence
  CAR E6 Fc/8/4-1BB/CD3z sequence
atggccctgcccgtgaccgctttgctgctccccctggcgctgctgctgcacgccgccaggccagaggtccagctggttgagagtggcggtgggctggttaagcctggcggctccctgcggctgagctgcgccgcgagtggatttactttcagccgatatgggatgagttgggtgcggcaagctcccgggaagaggctggaatgggtctcaacaatctccggggggggcacttacatctattaccccgactcagtcaaggggagatttaccatttcacgagacaacgctaagaataccctgtatttgcagatgaattctctgagagcagaggacacagctgtttactattgtacccgcgacaactatggcaggaactacgactacggtatggactattggggacaagggacattggttacagtgagcagtggcggcgggggcagcggaggaggaggcagcggtggcggaggcagcgagatagtgctcacgcagtcacccgcgactctcagtctctcacctggggaacgagctaccctgacgtgctctgctacctcctcagtgtcatatattcactggtatcagcaacggcccgggcagtcccctagattgctcatttatagtacctctaatctggcctcaggtatccctgcacgattttctggatctggttcaggttctgattacaccctcactatctctagcctggagcctgaagactttgccgtttattactgccagcagaggtctagctccccattcacctttgggagtgggaccaaggttgaaattaaagagcccaaatcttgtgacaaaactcacacatgcccaccgtgcccagcacctgaactcctggggggaccgtcagtcttcctcttccccccaaaacccaaggacaccctcatgatctcccggacccctgaggtcacatgcgtggtggtggacgtgagccacgaagaccctgaggtcaagttcaactggtacgtggacggcgtggaggtgcataatgccaagacaaagccgcgggaggagcagtacaacagcacgtaccgtgtggtcagcgtcctcaccgtcctgcaccaggactggctgaatggcaaggagtacaagtgcaaggtctccaacaaagccctcccagcccccatcgagaaaaccatctccaaagccaaagggcagccccgagaaccacaggtgtacaccctgcccccatcccgggaggagatgaccaagaaccaggtcagcctgacctgcctggtcaaaggcttctatcccagcgacatcgccgtggagtgggagagcaatgggcagccggagaacaactacaagaccacgcctcccgtgctggactccgacggctccttcttcctctacagcaagctcaccgtggacaagagcaggtggcagcaggggaacgtcttctcatgctccgtgatgcatgaggctctgcacaaccactacacgcagaagagcctctccctgtctccgggtaaaatctacatttgggccccgctcgcaggcacatgtggagtgctcctcctctccctggtgattaccctgtactgcaaaaggggccgcaaaaaactcctttacatttttaagcagccttttatgaggccagtacagacgactcaagaggaagacgggtgctcatgccgctttcctgaggaggaggaaggagggtgcgaactgcgcgttaagttctcccgatcagccgacgcgcctgcttacaagcagggccagaaccaactgtacaacgagctgaatctcggtagacgggaagagtacgacgtgttggacaaacggagaggccgcgacccagaaatgggcggcaagcctcgcaggaaaaacccccaggagggactgtacaatgagttgcagaaagataagatggcagaagcttatagcgagatcggaatgaagggggaaaggagacgagggaaaggacacgacggcctttatcagggcctgtccacagcaacaaaagatacgtatgacgccctccatatgcaggcacttccaccacggtgataa

SEQ ID NO: 311 - protein, 674 aa, Artificial Sequence
  CAR E6 Fc/8/4-1BB/CD3z sequence
MALPVTALLLPLALLLHAARPEVQLVESGGGLVKPGGSLRLSCAASGFTFSRYGMSWVRQAPGKRLEWVSTISGGGTYIYYPDSVKGRFTISRDNAKNTLYLQMNSLRAEDTAVYYCTRDNYGRNYDYGMDYWGQGTLVTVSSGGGGSGGGGSGGGGSEIVLTQSPATLSLSPGERATLTCSATSSVSYIHWYQQRPGQSPRLLIYSTSNLASGIPARFSGSGSGSDYTLTISSLEPEDFAVYYCQQRSSSPFTFGSGTKVEIKEPKSCDKTHTCPPCPAPELLGGPSVFLFPPKPKDTLMISRTPEVTCVVVDVSHEDPEVKFNWYVDGVEVHNAKTKPREEQYNSTYRVVSVLTVLHQDWLNGKEYKCKVSNKALPAPIEKTISKAKGQPREPQVYTLPPSREEMTKNQVSLTCLVKGFYPSDIAVEWESNGQPENNYKTTPPVLDSDGSFFLYSKLTVDKSRWQQGNVFSCSVMHEALHNHYTQKSLSLSPGKIYIWAPLAGTCGVLLLSLVITLYCKRGRKKLLYIFKQPFMRPVQTTQEEDGCSCRFPEEEEGGCELRVKFSRSADAPAYKQGQNQLYNELNLGRREEYDVLDKRRGRDPEMGGKPRRKNPQEGLYNELQKDKMAEAYSEIGMKGERRRGKGHDGLYQGLSTATKDTYDALHMQALPPR

SEQ ID NO: 312 - DNA, 714 bp, Artificial Sequence
  E6 CAR pCDH gBLOCK sequence
acgctgttttgacctccatagaagattctagagctagctgtagagcttggtaccgagggccaccatggccctgcccgtgaccgctttgctgctccccctggcgctgctgctgcacgccgccaggccagaggtccagctggttgagagtggcggtgggctggttaagcctggcggctccctgcggctgagctgcgccgcgagtggatttactttcagccgatatgggatgagttgggtgcggcaagctcccgggaagaggctggaatgggtctcaacaatctccggggggggcacttacatctattaccccgactcagtcaaggggagatttaccatttcacgagacaacgctaagaataccctgtatttgcagatgaattctctgagagcagaggacacagctgtttactattgtacccgcgacaactatggcaggaactacgactacggtatggactattggggacaagggacattggttacagtgagcagtggcggcgggggcagcggaggaggaggcagcggtggcggaggcagcgagatagtgctcacgcagtcacccgcgactctcagtctctcacctggggaacgagctaccctgacgtgctctgctacctcctcagtgtcatatattcactggtatcagcaacggcccgggcagtcccctagattgctcatttatagtacctctaatctggcctcaggtatccctgc

SEQ ID NO: 313 - DNA, 723 bp, Artificial Sequence
  E6 CAR Fc pCDH gBLOCK sequence
agtacctctaatctggcctcaggtatccctgcacgattttctggatctggttcaggttctgattacaccctcactatctctagcctggagcctgaagactttgccgtttattactgccagcagaggtctagctccccattcacctttgggagtgggaccaaggttgaaattaaagagcccaaatcttgtgacaaaactcacacatgcccaccgtgcccagcacctgaactcctggggggaccgtcagtcttcctcttccccccaaaacccaaggacaccctcatgatctcccggacccctgaggtcacatgcgtggtggtggacgtgagccacgaagaccctgaggtcaagttcaactggtacgtggacggcgtggaggtgcataatgccaagacaaagccgcgggaggagcagtacaacagcacgtaccgtgtggtcagcgtcctcaccgtcctgcaccaggactggctgaatggcaaggagtacaagtgcaaggtctccaacaaagccctcccagcccccatcgagaaaaccatctccaaagccaaagggcagccccgagaaccacaggtgtacaccctgcccccatcccgggaggagatgaccaagaaccaggtcagcctgacctgcctggtcaaaggcttctatcccagcgacatcgccgtggagtgggagagcaatgggcagccggagaacaactacaagaccacgcctcccgtgctg

SEQ ID NO: 314 - DNA, 778 bp, Artificial Sequence
  E6 CAR 8BB3 pCDH gBLOCK sequence
agaacaactacaagaccacgcctcccgtgctggactccgacggctccttcttcctctacagcaagctcaccgtggacaagagcaggtggcagcaggggaacgtcttctcatgctccgtgatgcatgaggctctgcacaaccactacacgcagaagagcctctccctgtctccgggtaaaatctacatttgggccccgctcgcaggcacatgtggagtgctcctcctctccctggtgattaccctgtactgcaaaaggggccgcaaaaaactcctttacatttttaagcagccttttatgaggccagtacagacgactcaagaggaagacgggtgctcatgccgctttcctgaggaggaggaaggagggtgcgaactgcgcgttaagttctcccgatcagccgacgcgcctgcttacaagcagggccagaaccaactgtacaacgagctgaatctcggtagacgggaagagtacgacgtgttggacaaacggagaggccgcgacccagaaatgggcggcaagcctcgcaggaaaaacccccaggagggactgtacaatgagttgcagaaagataagatggcagaagcttatagcgagatcggaatgaagggggaaaggagacgagggaaaggacacgacggcctttatcagggcctgtccacagcaacaaaagatacgtatgacgccctccatatgcaggcacttccaccacggtgataagtttaaacccgctgatcaggcggccgcgaaggatctgcgatcgctccggtgcccgtcag

SEQ ID NO: 315 - DNA, 1983 bp, Artificial Sequence
  CAR E6 FcH/8/4-1BB/CD3z sequence
atggccctgcccgtgaccgctttgctgctccccctggcgctgctgctgcacgccgccaggccagaggtccagctggttgagagtggcggtgggctggttaagcctggcggctccctgcggctgagctgcgccgcgagtggatttactttcagccgatatgggatgagttgggtgcggcaagctcccgggaagaggctggaatgggtctcaacaatctccggggggggcacttacatctattaccccgactcagtcaaggggagatttaccatttcacgagacaacgctaagaataccctgtatttgcagatgaattctctgagagcagaggacacagctgtttactattgtacccgcgacaactatggcaggaactacgactacggtatggactattggggacaagggacattggttacagtgagcagtggcggcgggggcagcggaggaggaggcagcggtggcggaggcagcgagatagtgctcacgcagtcacccgcgactctcagtctctcacctggggaacgagctaccctgacgtgctctgctacctcctcagtgtcatatattcactggtatcagcaacggcccgggcagtcccctagattgctcatttatagtacctctaatctggcctcaggtatccctgcacgattttctggatctggttcaggttctgattacaccctcactatctctagcctggagcctgaagactttgccgtttattactgccagcagaggtctagctccccattcacctttgggagtgggaccaaggttgaaattaaagcacctgaactcctggggggaccgtcagtcttcctcttccccccaaaacccaaggacaccctcatgatctcccggacccctgaggtcacatgcgtggtggtggacgtgagccacgaagaccctgaggtcaagttcaactggtacgtggacggcgtggaggtgcataatgccaagacaaagccgcgggaggagcagtacaacagcacgtaccgtgtggtcagcgtcctcaccgtcctgcaccaggactggctgaatggcaaggagtacaagtgcaaggtctccaacaaagccctcccagcccccatcgagaaaaccatctccaaagccaaagggcagccccgagaaccacaggtgtacaccctgcccccatcccgggaggagatgaccaagaaccaggtcagcctgacctgcctggtcaaaggcttctatcccagcgacatcgccgtggagtgggagagcaatgggcagccggagaacaactacaagaccacgcctcccgtgctggactccgacggctccttcttcctctacagcaagctcaccgtggacaagagcaggtggcagcaggggaacgtcttctcatgctccgtgatgcatgaggctctgcacaaccactacacgcagaagagcctctccctgtctccgggtaaaatctacatttgggccccgctcgcaggcacatgtggagtgctcctcctctccctggtgattaccctgtactgcaaaaggggccgcaaaaaactcctttacatttttaagcagccttttatgaggccagtacagacgactcaagaggaagacgggtgctcatgccgctttcctgaggaggaggaaggagggtgcgaactgcgcgttaagttctcccgatcagccgacgcgcctgcttacaagcagggccagaaccaactgtacaacgagctgaatctcggtagacgggaagagtacgacgtgttggacaaacggagaggccgcgacccagaaatgggcggcaagcctcgcaggaaaaacccccaggagggactgtacaatgagttgcagaaagataagatggcagaagcttatagcgagatcggaatgaagggggaaaggagacgagggaaaggacacgacggcctttatcagggcctgtccacagcaacaaaagatacgtatgacgccctccatatgcaggcacttccaccacggtgataa

SEQ ID NO: 316 - protein, 659 aa, Artificial Sequence
  CAR E6 FcH/8/4-1BB/CD3z sequence
MALPVTALLLPLALLLHAARPEVQLVESGGGLVKPGGSLRLSCAASGFTFSRYGMSWVRQAPGKRLEWVSTISGGGTYIYYPDSVKGRFTISRDNAKNTLYLQMNSLRAEDTAVYYCTRDNYGRNYDYGMDYWGQGTLVTVSSGGGGSGGGGSGGGGSEIVLTQSPATLSLSPGERATLTCSATSSVSYIHWYQQRPGQSPRLLIYSTSNLASGIPARFSGSGSGSDYTLTISSLEPEDFAVYYCQQRSSSPFTFGSGTKVEIKAPELLGGPSVFLFPPKPKDTLMISRTPEVTCVVVDVSHEDPEVKFNWYVDGVEVHNAKTKPREEQYNSTYRVVSVLTVLHQDWLNGKEYKCKVSNKALPAPIEKTISKAKGQPREPQVYTLPPSREEMTKNQVSLTCLVKGFYPSDIAVEWESNGQPENNYKTTPPVLDSDGSFFLYSKLTVDKSRWQQGNVFSCSVMHEALHNHYTQKSLSLSPGKIYIWAPLAGTCGVLLLSLVITLYCKRGRKKLLYIFKQPFMRPVQTTQEEDGCSCRFPEEEEGGCELRVKFSRSADAPAYKQGQNQLYNELNLGRREEYDVLDKRRGRDPEMGGKPRRKNPQEGLYNELQKDKMAEAYSEIGMKGERRRGKGHDGLYQGLSTATKDTYDALHMQALPPR

SEQ ID NO: 317 - DNA, 678 bp, Artificial Sequence
  E6 CAR FcH pCDH gBLOCK sequence
agtacctctaatctggcctcaggtatccctgcacgattttctggatctggttcaggttctgattacaccctcactatctctagcctggagcctgaagactttgccgtttattactgccagcagaggtctagctccccattcacctttgggagtgggaccaaggttgaaattaaagcacctgaactcctggggggaccgtcagtcttcctcttccccccaaaacccaaggacaccctcatgatctcccggacccctgaggtcacatgcgtggtggtggacgtgagccacgaagaccctgaggtcaagttcaactggtacgtggacggcgtggaggtgcataatgccaagacaaagccgcgggaggagcagtacaacagcacgtaccgtgtggtcagcgtcctcaccgtcctgcaccaggactggctgaatggcaaggagtacaagtgcaaggtctccaacaaagccctcccagcccccatcgagaaaaccatctccaaagccaaagggcagccccgagaaccacaggtgtacaccctgcccccatcccgggaggagatgaccaagaaccaggtcagcctgacctgcctggtcaaaggcttctatcccagcgacatcgccgtggagtgggagagcaatgggcagccggagaacaactacaagaccacgcctcccgtgctg

SEQ ID NO: 318 - DNA, 2022 bp, Artificial Sequence
  CAR E6 Fc/4/4-1BB/CD3z sequence
atggccctgcccgtgaccgctttgctgctccccctggcgctgctgctgcacgccgccaggccagaggtccagctggttgagagtggcggtgggctggttaagcctggcggctccctgcggctgagctgcgccgcgagtggatttactttcagccgatatgggatgagttgggtgcggcaagctcccgggaagaggctggaatgggtctcaacaatctccggggggggcacttacatctattaccccgactcagtcaaggggagatttaccatttcacgagacaacgctaagaataccctgtatttgcagatgaattctctgagagcagaggacacagctgtttactattgtacccgcgacaactatggcaggaactacgactacggtatggactattggggacaagggacattggttacagtgagcagtggcggcgggggcagcggaggaggaggcagcggtggcggaggcagcgagatagtgctcacgcagtcacccgcgactctcagtctctcacctggggaacgagctaccctgacgtgctctgctacctcctcagtgtcatatattcactggtatcagcaacggcccgggcagtcccctagattgctcatttatagtacctctaatctggcctcaggtatccctgcacgattttctggatctggttcaggttctgattacaccctcactatctctagcctggagcctgaagactttgccgtttattactgccagcagaggtctagctccccattcacctttgggagtgggaccaaggttgaaattaaagagcccaaatcttgtgacaaaactcacacatgcccaccgtgcccagcacctgaactcctggggggaccgtcagtcttcctcttccccccaaaacccaaggacaccctcatgatctcccggacccctgaggtcacatgcgtggtggtggacgtgagccacgaagaccctgaggtcaagttcaactggtacgtggacggcgtggaggtgcataatgccaagacaaagccgcgggaggagcagtacaacagcacgtaccgtgtggtcagcgtcctcaccgtcctgcaccaggactggctgaatggcaaggagtacaagtgcaaggtctccaacaaagccctcccagcccccatcgagaaaaccatctccaaagccaaagggcagccccgagaaccacaggtgtacaccctgcccccatcccgggaggagatgaccaagaaccaggtcagcctgacctgcctggtcaaaggcttctatcccagcgacatcgccgtggagtgggagagcaatgggcagccggagaacaactacaagaccacgcctcccgtgctggactccgacggctccttcttcctctacagcaagctcaccgtggacaagagcaggtggcagcaggggaacgtcttctcatgctccgtgatgcatgaggctctgcacaaccactacacgcagaagagcctctccctgtctccgggtaaaatggccctgattgtgctggggggcgtcgccggcctcctgcttttcattgggctaggcatcttcttcaaaaggggccgcaaaaaactcctttacatttttaagcagccttttatgaggccagtacagacgactcaagaggaagacgggtgctcatgccgctttcctgaggaggaggaaggagggtgcgaactgcgcgttaagttctcccgatcagccgacgcgcctgcttacaagcagggccagaaccaactgtacaacgagctgaatctcggtagacgggaagagtacgacgtgttggacaaacggagaggccgcgacccagaaatgggcggcaagcctcgcaggaaaaacccccaggagggactgtacaatgagttgcagaaagataagatggcagaagcttatagcgagatcggaatgaagggggaaaggagacgagggaaaggacacgacggcctttatcagggcctgtccacagcaacaaaagatacgtatgacgccctccatatgcaggcacttccaccacggtgataa

SEQ ID NO: 319 - protein, 672 aa, Artificial Sequence
  CAR E6 Fc/4/4-1BB/CD3z sequence
MALPVTALLLPLALLLHAARPEVQLVESGGGLVKPGGSLRLSCAASGFTFSRYGMSWVRQAPGKRLEWVSTISGGGTYIYYPDSVKGRFTISRDNAKNTLYLQMNSLRAEDTAVYYCTRDNYGRNYDYGMDYWGQGTLVTVSSGGGGSGGGGSGGGGSEIVLTQSPATLSLSPGERATLTCSATSSVSYIHWYQQRPGQSPRLLIYSTSNLASGIPARFSGSGSGSDYTLTISSLEPEDFAVYYCQQRSSSPFTFGSGTKVEIKEPKSCDKTHTCPPCPAPELLGGPSVFLFPPKPKDTLMISRTPEVTCVVVDVSHEDPEVKFNWYVDGVEVHNAKTKPREEQYNSTYRVVSVLTVLHQDWLNGKEYKCKVSNKALPAPIEKTISKAKGQPREPQVYTLPPSREEMTKNQVSLTCLVKGFYPSDIAVEWESNGQPENNYKTTPPVLDSDGSFFLYSKLTVDKSRWQQGNVFSCSVMHEALHNHYTQKSLSLSPGKMALIVLGGVAGLLLFIGLGIFFKRGRKKLLYIFKQPFMRPVQTTQEEDGCSCRFPEEEEGGCELRVKFSRSADAPAYKQGQNQLYNELNLGRREEYDVLDKRRGRDPEMGGKPRRKNPQEGLYNELQKDKMAEAYSEIGMKGERRRGKGHDGLYQGLSTATKDTYDALHMQALPPR

SEQ ID NO: 320 - DNA, 772 bp, Artificial Sequence
  E6 CAR 44BB3 pCDH gBLOCK sequence
agaacaactacaagaccacgcctcccgtgctggactccgacggctccttcttcctctacagcaagctcaccgtggacaagagcaggtggcagcaggggaacgtcttctcatgctccgtgatgcatgaggctctgcacaaccactacacgcagaagagcctctccctgtctccgggtaaaatggccctgattgtgctggggggcgtcgccggcctcctgcttttcattgggctaggcatcttcttcaaaaggggccgcaaaaaactcctttacatttttaagcagccttttatgaggccagtacagacgactcaagaggaagacgggtgctcatgccgctttcctgaggaggaggaaggagggtgcgaactgcgcgttaagttctcccgatcagccgacgcgcctgcttacaagcagggccagaaccaactgtacaacgagctgaatctcggtagacgggaagagtacgacgtgttggacaaacggagaggccgcgacccagaaatgggcggcaagcctcgcaggaaaaacccccaggagggactgtacaatgagttgcagaaagataagatggcagaagcttatagcgagatcggaatgaagggggaaaggagacgagggaaaggacacgacggcctttatcagggcctgtccacagcaacaaaagatacgtatgacgccctccatatgcaggcacttccaccacggtgataagtttaaacccgctgatcaggcggccgcgaaggatctgcgatcgctccggtgcccgtcag

SEQ ID NO: 321 - DNA, 1977 bp, Artificial Sequence
  CAR E6 FcH/4/4-1BB/CD3z sequence
atggccctgcccgtgaccgctttgctgctccccctggcgctgctgctgcacgccgccaggccagaggtccagctggttgagagtggcggtgggctggttaagcctggcggctccctgcggctgagctgcgccgcgagtggatttactttcagccgatatgggatgagttgggtgcggcaagctcccgggaagaggctggaatgggtctcaacaatctccggggggggcacttacatctattaccccgactcagtcaaggggagatttaccatttcacgagacaacgctaagaataccctgtatttgcagatgaattctctgagagcagaggacacagctgtttactattgtacccgcgacaactatggcaggaactacgactacggtatggactattggggacaagggacattggttacagtgagcagtggcggcgggggcagcggaggaggaggcagcggtggcggaggcagcgagatagtgctcacgcagtcacccgcgactctcagtctctcacctggggaacgagctaccctgacgtgctctgctacctcctcagtgtcatatattcactggtatcagcaacggcccgggcagtcccctagattgctcatttatagtacctctaatctggcctcaggtatccctgcacgattttctggatctggttcaggttctgattacaccctcactatctctagcctggagcctgaagactttgccgtttattactgccagcagaggtctagctccccattcacctttgggagtgggaccaaggttgaaattaaagcacctgaactcctggggggaccgtcagtcttcctcttccccccaaaacccaaggacaccctcatgatctcccggacccctgaggtcacatgcgtggtggtggacgtgagccacgaagaccctgaggtcaagttcaactggtacgtggacggcgtggaggtgcataatgccaagacaaagccgcgggaggagcagtacaacagcacgtaccgtgtggtcagcgtcctcaccgtcctgcaccaggactggctgaatggcaaggagtacaagtgcaaggtctccaacaaagccctcccagcccccatcgagaaaaccatctccaaagccaaagggcagccccgagaaccacaggtgtacaccctgcccccatcccgggaggagatgaccaagaaccaggtcagcctgacctgcctggtcaaaggcttctatcccagcgacatcgccgtggagtgggagagcaatgggcagccggagaacaactacaagaccacgcctcccgtgctggactccgacggctccttcttcctctacagcaagctcaccgtggacaagagcaggtggcagcaggggaacgtcttctcatgctccgtgatgcatgaggctctgcacaaccactacacgcagaagagcctctccctgtctccgggtaaaatggccctgattgtgctggggggcgtcgccggcctcctgcttttcattgggctaggcatcttcttcaaaaggggccgcaaaaaactcctttacatttttaagcagccttttatgaggccagtacagacgactcaagaggaagacgggtgctcatgccgctttcctgaggaggaggaaggagggtgcgaactgcgcgttaagttctcccgatcagccgacgcgcctgcttacaagcagggccagaaccaactgtacaacgagctgaatctcggtagacgggaagagtacgacgtgttggacaaacggagaggccgcgacccagaaatgggcggcaagcctcgcaggaaaaacccccaggagggactgtacaatgagttgcagaaagataagatggcagaagcttatagcgagatcggaatgaagggggaaaggagacgagggaaaggacacgacggcctttatcagggcctgtccacagcaacaaaagatacgtatgacgccctccatatgcaggcacttccaccacggtgataa

SEQ ID NO: 322 - protein, 657 aa, Artificial Sequence
  CAR E6 FcH/4/4-1BB/CD3z sequence
MALPVTALLLPLALLLHAARPEVQLVESGGGLVKPGGSLRLSCAASGFTFSRYGMSWVRQAPGKRLEWVSTISGGGTYIYYPDSVKGRFTISRDNAKNTLYLQMNSLRAEDTAVYYCTRDNYGRNYDYGMDYWGQGTLVTVSSGGGGSGGGGSGGGGSEIVLTQSPATLSLSPGERATLTCSATSSVSYIHWYQQRPGQSPRLLIYSTSNLASGIPARFSGSGSGSDYTLTISSLEPEDFAVYYCQQRSSSPFTFGSGTKVEIKAPELLGGPSVFLFPPKPKDTLMISRTPEVTCVVVDVSHEDPEVKFNWYVDGVEVHNAKTKPREEQYNSTYRVVSVLTVLHQDWLNGKEYKCKVSNKALPAPIEKTISKAKGQPREPQVYTLPPSREEMTKNQVSLTCLVKGFYPSDIAVEWESNGQPENNYKTTPPVLDSDGSFFLYSKLTVDKSRWQQGNVFSCSVMHEALHNHYTQKSLSLSPGKMALIVLGGVAGLLLFIGLGIFFKRGRKKLLYIFKQPFMRPVQTTQEEDGCSCRFPEEEEGGCELRVKFSRSADAPAYKQGQNQLYNELNLGRREEYDVLDKRRGRDPEMGGKPRRKNPQEGLYNELQKDKMAEAYSEIGMKGERRRGKGHDGLYQGLSTATKDTYDALHMQALPPR

SEQ ID NO: 323 - DNA, 1506 bp, Artificial Sequence
  CAR E6 IgD/8/4-1BB/CD3z sequence
atggccctgcccgtgaccgctttgctgctccccctggcgctgctgctgcacgccgccaggccagaggtccagctggttgagagtggcggtgggctggttaagcctggcggctccctgcggctgagctgcgccgcgagtggatttactttcagccgatatgggatgagttgggtgcggcaagctcccgggaagaggctggaatgggtctcaacaatctccggggggggcacttacatctattaccccgactcagtcaaggggagatttaccatttcacgagacaacgctaagaataccctgtatttgcagatgaattctctgagagcagaggacacagctgtttactattgtacccgcgacaactatggcaggaactacgactacggtatggactattggggacaagggacattggttacagtgagcagtggcggcgggggcagcggaggaggaggcagcggtggcggaggcagcgagatagtgctcacgcagtcacccgcgactctcagtctctcacctggggaacgagctaccctgacgtgctctgctacctcctcagtgtcatatattcactggtatcagcaacggcccgggcagtcccctagattgctcatttatagtacctctaatctggcctcaggtatccctgcacgattttctggatctggttcaggttctgattacaccctcactatctctagcctggagcctgaagactttgccgtttattactgccagcagaggtctagctccccattcacctttgggagtgggaccaaggttgaaattaaagagtctccaaaggcacaggcctcctcagtgcccactgcacaaccccaagcagagggcagcctcgccaaggcaaccacagccccagccaccacccgtaacacaggaagaggcggcgaagagaagaaaaaggagaaggagaaagaggaacaagaagagagagagacaaagacaccaatctacatttgggccccgctcgcaggcacatgtggagtgctcctcctctccctggtgattaccctgtactgcaaaaggggccgcaaaaaactcctttacatttttaagcagccttttatgaggccagtacagacgactcaagaggaagacgggtgctcatgccgctttcctgaggaggaggaaggagggtgcgaactgcgcgttaagttctcccgatcagccgacgcgcctgcttacaagcagggccagaaccaactgtacaacgagctgaatctcggtagacgggaagagtacgacgtgttggacaaacggagaggccgcgacccagaaatgggcggcaagcctcgcaggaaaaacccccaggagggactgtacaatgagttgcagaaagataagatggcagaagcttatagcgagatcggaatgaagggggaaaggagacgagggaaaggacacgacggcctttatcagggcctgtccacagcaacaaaagatacgtatgacgccctccatatgcaggcacttccaccacggtgataa

SEQ ID NO: 324 - protein, 500 aa, Artificial Sequence
  CAR E6 IgD/8/4-1BB/CD3z sequence
MALPVTALLLPLALLLHAARPEVQLVESGGGLVKPGGSLRLSCAASGFTFSRYGMSWVRQAPGKRLEWVSTISGGGTYIYYPDSVKGRFTISRDNAKNTLYLQMNSLRAEDTAVYYCTRDNYGRNYDYGMDYWGQGTLVTVSSGGGGSGGGGSGGGGSEIVLTQSPATLSLSPGERATLTCSATSSVSYIHWYQQRPGQSPRLLIYSTSNLASGIPARFSGSGSGSDYTLTISSLEPEDFAVYYCQQRSSSPFTFGSGTKVEIKESPKAQASSVPTAQPQAEGSLAKATTAPATTRNTGRGGEEKKKEKEKEEQEERETKTPIYIWAPLAGTCGVLLLSLVITLYCKRGRKKLLYIFKQPFMRPVQTTQEEDGCSCRFPEEEEGGCELRVKFSRSADAPAYKQGQNQLYNELNLGRREEYDVLDKRRGRDPEMGGKPRRKNPQEGLYNELQKDKMAEAYSEIGMKGERRRGKGHDGLYQGLSTATKDTYDALHMQALPPR

SEQ ID NO: 325 - DNA, 475 bp, Artificial Sequence
  E6 CAR IgD8 pcDH gBLOCK sequence
agtacctctaatctggcctcaggtatccctgcacgattttctggatctggttcaggttctgattacaccctcactatctctagcctggagcctgaagactttgccgtttattactgccagcagaggtctagctccccattcacctttgggagtgggaccaaggttgaaattaaagagtctccaaaggcacaggcctcctcagtgcccactgcacaaccccaagcagagggcagcctcgccaaggcaaccacagccccagccaccacccgtaacacaggaagaggcggcgaagagaagaaaaaggagaaggagaaagaggaacaagaagagagagagacaaagacaccaatctacatttgggccccgctcgcaggcacatgtggagtgctcctcctctccctggtgattaccctgtactgcaaaaggggccgcaaaaaactcctttacatttttaagcagccttttatgaggccag

SEQ ID NO: 326 - DNA, 502 bp, Artificial Sequence
  E6 CAR BB 3 pCDH gBLOCK sequence
acatttttaagcagccttttatgaggccagtacagacgactcaagaggaagacgggtgctcatgccgctttcctgaggaggaggaaggagggtgcgaactgcgcgttaagttctcccgatcagccgacgcgcctgcttacaagcagggccagaaccaactgtacaacgagctgaatctcggtagacgggaagagtacgacgtgttggacaaacggagaggccgcgacccagaaatgggcggcaagcctcgcaggaaaaacccccaggagggactgtacaatgagttgcagaaagataagatggcagaagcttatagcgagatcggaatgaagggggaaaggagacgagggaaaggacacgacggcctttatcagggcctgtccacagcaacaaaagatacgtatgacgccctccatatgcaggcacttccaccacggtgataagtttaaacccgctgatcaggcggccgcgaaggatctgcgatcgctccggtgcccgtcag

SEQ ID NO: 327 - DNA, 1500 bp, Artificial Sequence
  CAR E6 IgD/4/4-1BB/CD3z sequence
atggccctgcccgtgaccgctttgctgctccccctggcgctgctgctgcacgccgccaggccagaggtccagctggttgagagtggcggtgggctggttaagcctggcggctccctgcggctgagctgcgccgcgagtggatttactttcagccgatatgggatgagttgggtgcggcaagctcccgggaagaggctggaatgggtctcaacaatctccggggggggcacttacatctattaccccgactcagtcaaggggagatttaccatttcacgagacaacgctaagaataccctgtatttgcagatgaattctctgagagcagaggacacagctgtttactattgtacccgcgacaactatggcaggaactacgactacggtatggactattggggacaagggacattggttacagtgagcagtggcggcgggggcagcggaggaggaggcagcggtggcggaggcagcgagatagtgctcacgcagtcacccgcgactctcagtctctcacctggggaacgagctaccctgacgtgctctgctacctcctcagtgtcatatattcactggtatcagcaacggcccgggcagtcccctagattgctcatttatagtacctctaatctggcctcaggtatccctgcacgattttctggatctggttcaggttctgattacaccctcactatctctagcctggagcctgaagactttgccgtttattactgccagcagaggtctagctccccattcacctttgggagtgggaccaaggttgaaattaaagagtctccaaaggcacaggcctcctcagtgcccactgcacaaccccaagcagagggcagcctcgccaaggcaaccacagccccagccaccacccgtaacacaggaagaggcggcgaagagaagaaaaaggagaaggagaaagaggaacaagaagagagagagacaaagacaccaatggccctgattgtgctggggggcgtcgccggcctcctgcttttcattgggctaggcatcttcttcaaaaggggccgcaaaaaactcctttacatttttaagcagccttttatgaggccagtacagacgactcaagaggaagacgggtgctcatgccgctttcctgaggaggaggaaggagggtgcgaactgcgcgttaagttctcccgatcagccgacgcgcctgcttacaagcagggccagaaccaactgtacaacgagctgaatctcggtagacgggaagagtacgacgtgttggacaaacggagaggccgcgacccagaaatgggcggcaagcctcgcaggaaaaacccccaggagggactgtacaatgagttgcagaaagataagatggcagaagcttatagcgagatcggaatgaagggggaaaggagacgagggaaaggacacgacggcctttatcagggcctgtccacagcaacaaaagatacgtatgacgccctccatatgcaggcacttccaccacggtgataa

SEQ ID NO: 328 - protein, 498 aa, Artificial Sequence
  CAR E6 IgD/4/4-1BB/CD3z sequence
MALPVTALLLPLALLLHAARPEVQLVESGGGLVKPGGSLRLSCAASGFTFSRYGMSWVRQAPGKRLEWVSTISGGGTYIYYPDSVKGRFTISRDNAKNTLYLQMNSLRAEDTAVYYCTRDNYGRNYDYGMDYWGQGTLVTVSSGGGGSGGGGSGGGGSEIVLTQSPATLSLSPGERATLTCSATSSVSYIHWYQQRPGQSPRLLIYSTSNLASGIPARFSGSGSGSDYTLTISSLEPEDFAVYYCQQRSSSPFTFGSGTKVEIKESPKAQASSVPTAQPQAEGSLAKATTAPATTRNTGRGGEEKKKEKEKEEQEERETKTPMALIVLGGVAGLLLFIGLGIFFKRGRKKLLYIFKQPFMRPVQTTQEEDGCSCRFPEEEEGGCELRVKFSRSADAPAYKQGQNQLYNELNLGRREEYDVLDKRRGRDPEMGGKPRRKNPQEGLYNELQKDKMAEAYSEIGMKGERRRGKGHDGLYQGLSTATKDTYDALHMQALPPR

SEQ ID NO: 329 - DNA, 469 bp, Artificial Sequence
  E6 CAR IgD4 pcDH gBLOCK sequence
agtacctctaatctggcctcaggtatccctgcacgattttctggatctggttcaggttctgattacaccctcactatctctagcctggagcctgaagactttgccgtttattactgccagcagaggtctagctccccattcacctttgggagtgggaccaaggttgaaattaaagagtctccaaaggcacaggcctcctcagtgcccactgcacaaccccaagcagagggcagcctcgccaaggcaaccacagccccagccaccacccgtaacacaggaagaggcggcgaagagaagaaaaaggagaaggagaaagaggaacaagaagagagagagacaaagacaccaatggccctgattgtgctggggggcgtcgccggcctcctgcttttcattgggctaggcatcttcttcaaaaggggccgcaaaaaactcctttacatttttaagcagccttttatgaggccag

SEQ ID NO: 330 - DNA, 1461 bp, Artificial Sequence
  CAR E6 X4/8/4-1BB/CD3z sequence
atggccctgcccgtgaccgctttgctgctccccctggcgctgctgctgcacgccgccaggccagaggtccagctggttgagagtggcggtgggctggttaagcctggcggctccctgcggctgagctgcgccgcgagtggatttactttcagccgatatgggatgagttgggtgcggcaagctcccgggaagaggctggaatgggtctcaacaatctccggggggggcacttacatctattaccccgactcagtcaaggggagatttaccatttcacgagacaacgctaagaataccctgtatttgcagatgaattctctgagagcagaggacacagctgtttactattgtacccgcgacaactatggcaggaactacgactacggtatggactattggggacaagggacattggttacagtgagcagtggcggcgggggcagcggaggaggaggcagcggtggcggaggcagcgagatagtgctcacgcagtcacccgcgactctcagtctctcacctggggaacgagctaccctgacgtgctctgctacctcctcagtgtcatatattcactggtatcagcaacggcccgggcagtcccctagattgctcatttatagtacctctaatctggcctcaggtatccctgcacgattttctggatctggttcaggttctgattacaccctcactatctctagcctggagcctgaagactttgccgtttattactgccagcagaggtctagctccccattcacctttgggagtgggaccaaggttgaaattaaagacaagacgcacaccaagccacctaaaccagctccagaactgctcggaggtcctggcaccggaaccggaggacctaccatcaaaccacctaagccacctaagcctgctcctaacctgctcggaggacctatctacatttgggccccgctcgcaggcacatgtggagtgctcctcctctccctggtgattaccctgtactgcaaaaggggccgcaaaaaactcctttacatttttaagcagccttttatgaggccagtacagacgactcaagaggaagacgggtgctcatgccgctttcctgaggaggaggaaggagggtgcgaactgcgcgttaagttctcccgatcagccgacgcgcctgcttacaagcagggccagaaccaactgtacaacgagctgaatctcggtagacgggaagagtacgacgtgttggacaaacggagaggccgcgacccagaaatgggcggcaagcctcgcaggaaaaacccccaggagggactgtacaatgagttgcagaaagataagatggcagaagcttatagcgagatcggaatgaagggggaaaggagacgagggaaaggacacgacggcctttatcagggcctgtccacagcaacaaaagatacgtatgacgccctccatatgcaggcacttccaccacggtgataa

SEQ ID NO: 331 - protein, 485 aa, Artificial Sequence
  CAR E6 X4/8/4-1BB/CD3z sequence
MALPVTALLLPLALLLHAARPEVQLVESGGGLVKPGGSLRLSCAASGFTFSRYGMSWVRQAPGKRLEWVSTISGGGTYIYYPDSVKGRFTISRDNAKNTLYLQMNSLRAEDTAVYYCTRDNYGRNYDYGMDYWGQGTLVTVSSGGGGSGGGGSGGGGSEIVLTQSPATLSLSPGERATLTCSATSSVSYIHWYQQRPGQSPRLLIYSTSNLASGIPARFSGSGSGSDYTLTISSLEPEDFAVYYCQQRSSSPFTFGSGTKVEIKDKTHTKPPKPAPELLGGPGTGTGGPTIKPPKPPKPAPNLLGGPIYIWAPLAGTCGVLLLSLVITLYCKRGRKKLLYIFKQPFMRPVQTTQEEDGCSCRFPEEEEGGCELRVKFSRSADAPAYKQGQNQLYNELNLGRREEYDVLDKRRGRDPEMGGKPRRKNPQEGLYNELQKDKMAEAYSEIGMKGERRRGKGHDGLYQGLSTATKDTYDALHMQALPPR

SEQ ID NO: 332 - DNA, 430 bp, Artificial Sequence
  E6 CAR X48 pCDH gBLOCK sequence
agtacctctaatctggcctcaggtatccctgcacgattttctggatctggttcaggttctgattacaccctcactatctctagcctggagcctgaagactttgccgtttattactgccagcagaggtctagctccccattcacctttgggagtgggaccaaggttgaaattaaagacaagacgcacaccaagccacctaaaccagctccagaactgctcggaggtcctggcaccggaaccggaggacctaccatcaaaccacctaagccacctaagcctgctcctaacctgctcggaggacctatctacatttgggccccgctcgcaggcacatgtggagtgctcctcctctccctggtgattaccctgtactgcaaaaggggccgcaaaaaactcctttacatttttaagcagccttttatgaggccag

SEQ ID NO: 333 - DNA, 1455 bp, Artificial Sequence
  CAR E6 X4/4/4-1BB/CD3z sequence
atggccctgcccgtgaccgctttgctgctccccctggcgctgctgctgcacgccgccaggccagaggtccagctggttgagagtggcggtgggctggttaagcctggcggctccctgcggctgagctgcgccgcgagtggatttactttcagccgatatgggatgagttgggtgcggcaagctcccgggaagaggctggaatgggtctcaacaatctccggggggggcacttacatctattaccccgactcagtcaaggggagatttaccatttcacgagacaacgctaagaataccctgtatttgcagatgaattctctgagagcagaggacacagctgtttactattgtacccgcgacaactatggcaggaactacgactacggtatggactattggggacaagggacattggttacagtgagcagtggcggcgggggcagcggaggaggaggcagcggtggcggaggcagcgagatagtgctcacgcagtcacccgcgactctcagtctctcacctggggaacgagctaccctgacgtgctctgctacctcctcagtgtcatatattcactggtatcagcaacggcccgggcagtcccctagattgctcatttatagtacctctaatctggcctcaggtatccctgcacgattttctggatctggttcaggttctgattacaccctcactatctctagcctggagcctgaagactttgccgtttattactgccagcagaggtctagctccccattcacctttgggagtgggaccaaggttgaaattaaagacaagacgcacaccaagccacctaaaccagctccagaactgctcggaggtcctggcaccggaaccggaggacctaccatcaaaccacctaagccacctaagcctgctcctaacctgctcggaggacctatggccctgattgtgctggggggcgtcgccggcctcctgcttttcattgggctaggcatcttcttcaaaaggggccgcaaaaaactcctttacatttttaagcagccttttatgaggccagtacagacgactcaagaggaagacgggtgctcatgccgctttcctgaggaggaggaaggagggtgcgaactgcgcgttaagttctcccgatcagccgacgcgcctgcttacaagcagggccagaaccaactgtacaacgagctgaatctcggtagacgggaagagtacgacgtgttggacaaacggagaggccgcgacccagaaatgggcggcaagcctcgcaggaaaaacccccaggagggactgtacaatgagttgcagaaagataagatggcagaagcttatagcgagatcggaatgaagggggaaaggagacgagggaaaggacacgacggcctttatcagggcctgtccacagcaacaaaagatacgtatgacgccctccatatgcaggcacttccaccacggtgataa

SEQ ID NO: 334 - protein, 483 aa, Artificial Sequence
  CAR E6 X4/4/4-1BB/CD3z sequence
MALPVTALLLPLALLLHAARPEVQLVESGGGLVKPGGSLRLSCAASGFTFSRYGMSWVRQAPGKRLEWVSTISGGGTYIYYPDSVKGRFTISRDNAKNTLYLQMNSLRAEDTAVYYCTRDNYGRNYDYGMDYWGQGTLVTVSSGGGGSGGGGSGGGGSEIVLTQSPATLSLSPGERATLTCSATSSVSYIHWYQQRPGQSPRLLIYSTSNLASGIPARFSGSGSGSDYTLTISSLEPEDFAVYYCQQRSSSPFTFGSGTKVEIKDKTHTKPPKPAPELLGGPGTGTGGPTIKPPKPPKPAPNLLGGPMALIVLGGVAGLLLFIGLGIFFKRGRKKLLYIFKQPFMRPVQTTQEEDGCSCRFPEEEEGGCELRVKFSRSADAPAYKQGQNQLYNELNLGRREEYDVLDKRRGRDPEMGGKPRRKNPQEGLYNELQKDKMAEAYSEIGMKGERRRGKGHDGLYQGLSTATKDTYDALHMQALPPR

SEQ ID NO: 335 - DNA, 424 bp, Artificial Sequence
  E6 CAR X44 pCDH gBLOCK sequence
agtacctctaatctggcctcaggtatccctgcacgattttctggatctggttcaggttctgattacaccctcactatctctagcctggagcctgaagactttgccgtttattactgccagcagaggtctagctccccattcacctttgggagtgggaccaaggttgaaattaaagacaagacgcacaccaagccacctaaaccagctccagaactgctcggaggtcctggcaccggaaccggaggacctaccatcaaaccacctaagccacctaagcctgctcctaacctgctcggaggacctatggccctgattgtgctggggggcgtcgccggcctcctgcttttcattgggctaggcatcttcttcaaaaggggccgcaaaaaactcctttacatttttaagcagccttttatgaggccag

SEQ ID NO: 336 - DNA, 1461 bp, Artificial Sequence
  CAR E6 8+4/4/4-1BB/CD3z sequence
atggccctgcccgtgaccgctttgctgctccccctggcgctgctgctgcacgccgccaggccagaggtccagctggttgagagtggcggtgggctggttaagcctggcggctccctgcggctgagctgcgccgcgagtggatttactttcagccgatatgggatgagttgggtgcggcaagctcccgggaagaggctggaatgggtctcaacaatctccggggggggcacttacatctattaccccgactcagtcaaggggagatttaccatttcacgagacaacgctaagaataccctgtatttgcagatgaattctctgagagcagaggacacagctgtttactattgtacccgcgacaactatggcaggaactacgactacggtatggactattggggacaagggacattggttacagtgagcagtggcggcgggggcagcggaggaggaggcagcggtggcggaggcagcgagatagtgctcacgcagtcacccgcgactctcagtctctcacctggggaacgagctaccctgacgtgctctgctacctcctcagtgtcatatattcactggtatcagcaacggcccgggcagtcccctagattgctcatttatagtacctctaatctggcctcaggtatccctgcacgattttctggatctggttcaggttctgattacaccctcactatctctagcctggagcctgaagactttgccgtttattactgccagcagaggtctagctccccattcacctttgggagtgggaccaaggttgaaattaaaacgacaaccccggcccccagaccaccaacgccagcccccaccatcgccagccaacccctgtctctgagaccagaagcctgtaggcctgccgccggtggagctgtgcacacaagaggactggatttcgcctgtgatatggccctgattgtgctggggggcgtcgccggcctcctgcttttcattgggctaggcatcttcttcaaaaggggccgcaaaaaactcctttacatttttaagcagccttttatgaggccagtacagacgactcaagaggaagacgggtgctcatgccgctttcctgaggaggaggaaggagggtgcgaactgcgcgttaagttctcccgatcagccgacgcgcctgcttacaagcagggccagaaccaactgtacaacgagctgaatctcggtagacgggaagagtacgacgtgttggacaaacggagaggccgcgacccagaaatgggcggcaagcctcgcaggaaaaacccccaggagggactgtacaatgagttgcagaaagataagatggcagaagcttatagcgagatcggaatgaagggggaaaggagacgagggaaaggacacgacggcctttatcagggcctgtccacagcaacaaaagatacgtatgacgccctccatatgcaggcacttccaccacggtgataa

SEQ ID NO: 337 - protein, 485 aa, Artificial Sequence
  CAR E6 8+4/4/4-1BB/CD3z sequence
MALPVTALLLPLALLLHAARPEVQLVESGGGLVKPGGSLRLSCAASGFTFSRYGMSWVRQAPGKRLEWVSTISGGGTYIYYPDSVKGRFTISRDNAKNTLYLQMNSLRAEDTAVYYCTRDNYGRNYDYGMDYWGQGTLVTVSSGGGGSGGGGSGGGGSEIVLTQSPATLSLSPGERATLTCSATSSVSYIHWYQQRPGQSPRLLIYSTSNLASGIPARFSGSGSGSDYTLTISSLEPEDFAVYYCQQRSSSPFTFGSGTKVEIKTTTPAPRPPTPAPTIASQPLSLRPEACRPAAGGAVHTRGLDFACDMALIVLGGVAGLLLFIGLGIFFKRGRKKLLYIFKQPFMRPVQTTQEEDGCSCRFPEEEEGGCELRVKFSRSADAPAYKQGQNQLYNELNLGRREEYDVLDKRRGRDPEMGGKPRRKNPQEGLYNELQKDKMAEAYSEIGMKGERRRGKGHDGLYQGLSTATKDTYDALHMQALPPR

SEQ ID NO: 338 - DNA, 430 bp, Artificial Sequence
  E6 CAR CD844 pCDH gBLOCK sequence
agtacctctaatctggcctcaggtatccctgcacgattttctggatctggttcaggttctgattacaccctcactatctctagcctggagcctgaagactttgccgtttattactgccagcagaggtctagctccccattcacctttgggagtgggaccaaggttgaaattaaaacgacaaccccggcccccagaccaccaacgccagcccccaccatcgccagccaacccctgtctctgagaccagaagcctgtaggcctgccgccggtggagctgtgcacacaagaggactggatttcgcctgtgatatggccctgattgtgctggggggcgtcgccggcctcctgcttttcattgggctaggcatcttcttcaaaaggggccgcaaaaaactcctttacatttttaagcagccttttatgaggccag

SEQ ID NO: 339 - DNA, 820 bp, Artificial Sequence
  Humanized C2 scFV sequence in CAR
gagggccaccatggccttgccagtgacggccctgctgctgccattggctcttctgttgcacgctgccaggcctgaagtgcagctcgtagagagtggcgggggactggtgaagcccggtggaagcctcagactcagttgcgccgcctcaggtttcactttttcaggttacgccatgtcctgggtaagacaggcaccggggaaaggactcgagtgggtgtctactatcagctcaggaggcacttatatatattatcctgactctgtaaaaggccgatttacgatttctcgcgacaatgcaaagaactccctctacctccaaatgaacagtcttagggcagaagacactgctgtatactattgtgcacgcctcggcggcgacaactactacgagtactttgacgtgtgggggaaagggactaccgtgacagtttcaagcggaggaggtggctcaggtggaggcgggtcaggggggggaggaagtgatattgtgctcacacaatccccagcctccctggctgtgtctcccggccaacgcgctacaattacatgtcgggcctccaaaagcgtgagcaccagcggctacagctacatgcactggtatcaacagaaaccaggacaaccccccaaactgttgatttatctcgcttcaaacttggagtccggcgtgcctgcgcgcttttcagggagtgggagcggcacagattttacgctgactatcaaccccgtagaagcaaacgatacagcgaattattattgtcaacattcccgggaactcccctttacgttcggcgggggcacaaaggtcgaaattaagagaacc

SEQ ID NO: 340 - protein, 249 aa, Artificial Sequence; identical to SEQ ID NO: 239
  Humanized C2 scFV sequence in CAR

SEQ ID NO: 341 - DNA, 729 bp, Artificial Sequence
  Humanized E6 scFV sequence in CAR
gaggtccagctggttgagagtggcggtgggctggttaagcctggcggctccctgcggctgagctgcgccgcgagtggatttactttcagccgatatgggatgagttgggtgcggcaagctcccgggaagaggctggaatgggtctcaacaatctccggggggggcacttacatctattaccccgactcagtcaaggggagatttaccatttcacgagacaacgctaagaataccctgtatttgcagatgaattctctgagagcagaggacacagctgtttactattgtacccgcgacaactatggcaggaactacgactacggtatggactattggggacaagggacattggttacagtgagcagtggcggcgggggcagcggaggaggaggcagcggtggggggggcagcgagatagtgctcacgcagtcacccgcgactctcagtctctcacctggggaacgagctaccctgacgtgctctgctacctcctcagtgtcatatattcactggtatcagcaacggcccgggcagtcccctagattgctcatttatagtacctctaatctggcctcaggtatccctgcacgattttctggatctggttcaggttctgattacaccctcactatctctagcctggagcctgaagactttgccgtttattactgccagcagaggtctagctccccattcacctttgggagtgggaccaaggttgaaattaaa

SEQ ID NO: 342 - protein, 243 aa, Artificial Sequence; identical to SEQ ID NO: 233
  Humanized E6 scFV sequence in CAR

SEQ ID NO: 343 - DNA, 63 bp, Artificial Sequence
  CD8 leader sequence
atggccctgcccgtgaccgctttgctgctccccctggcgctgctgctgcacgccgccaggcca

SEQ ID NO: 344 - protein, 21 aa, Artificial Sequence
  CD8 leader sequence
MALPVTALLLPLALLLHAARP

SEQ ID NO: 345 - DNA, 135 bp, Artificial Sequence
  CD8 hinge domain sequence
acgacaaccccggcccccagaccaccaacgccagcccccaccatcgccagccaacccctgtctctgagaccagaagcctgtaggcctgccgccggtggagctgtgcacacaagaggactggatttcgcctgtgat

SEQ ID NO: 346 - protein, 45 aa, Artificial Sequence
  CD8 hinge domain sequence
TTTPAPRPPTPAPTIASQPLSLRPEACRPAAGGAVHTRGLDFACD

SEQ ID NO: 347 - DNA, 66 bp, Artificial Sequence
  CD4 hinge domain sequence
tcgggacaggtcctgctggaatccaacatcaaggttctgcccacatggtccaccccggtgcagcca

SEQ ID NO: 348 - protein, 22 aa, Artificial Sequence
  CD4 hinge domain sequence
SGQVLLESNIKVLPTWSTPVQP

SEQ ID NO: 349 - DNA, 45 bp, Artificial Sequence
  CD28 hinge domain sequence
aaacacctttgtccaagtcccctatttcccggaccttctaagccc

SEQ ID NO: 350 - protein, 15 aa, Artificial Sequence
  CD28 hinge domain sequence
KHLCPSPLFPGPSKP

SEQ ID NO: 351 - DNA, 201 bp, Artificial Sequence
  CD8+CD4 hinge domain sequence
acgacaaccccggcccccagaccaccaacgccagcccccaccatcgccagccaacccctgtctctgagaccagaagcctgtaggcctgccgccggtggagctgtgcacacaagaggactggatttcgcctgtgattcgggacaggtcctgctggaatccaacatcaaggttctgcccacatggtccaccccggtgcagcca

SEQ ID NO: 352 - protein, 67 aa, Artificial Sequence
  CD8+CD4 hinge domain sequence
TTTPAPRPPTPAPTIASQPLSLRPEACRPAAGGAVHTRGLDFACDSGQVLLESNIKVLPTWSTPVQP

SEQ ID NO: 353 - DNA, 180 bp, Artificial Sequence
  CD8+CD28 hinge domain sequence
acgacaaccccggcccccagaccaccaacgccagcccccaccatcgccagccaacccctgtctctgagaccagaagcctgtaggcctgccgccggtggagctgtgcacacaagaggactggatttcgcctgtgataaacacctttgtccaagtcccctatttcccggaccttctaagccc

SEQ ID NO: 354 - protein, 60 aa, Artificial Sequence
  CD8+CD28 hinge domain sequence
TTTPAPRPPTPAPTIASQPLSLRPEACRPAAGGAVHTRGLDFACDKHLCPSPLFPGPSKP

SEQ ID NO: 355 - DNA, 111 bp, Artificial Sequence
  CD28+CD4 hinge domain sequence
aaacacctttgtccaagtcccctatttcccggaccttctaagccctcgggacaggtcctgctggaatccaacatcaaggttctgcccacatggtccaccccggtgcagcca

SEQ ID NO: 356 - protein, 37 aa, Artificial Sequence
  CD28+CD4 hinge domain sequence
KHLCPSPLFPGPSKPSGQVLLESNIKVLPTWSTPVQP

SEQ ID NO: 357 - DNA, 174 bp, Artificial Sequence
  Human IgD hinge domain sequence
gagtctccaaaggcacaggcctcctcagtgcccactgcacaaccccaagcagagggcagcctcgccaaggcaaccacagccccagccaccacccgtaacacaggaagaggcggcgaagagaagaaaaaggagaaggagaaagaggaacaagaagagagagagacaaagacacca

SEQ ID NO: 358 - protein, 58 aa, Artificial Sequence
  Human IgD hinge domain sequence
ESPKAQASSVPTAQPQAEGSLAKATTAPATTRNTGRGGEEKKKEKEKEEQEERETKTP

SEQ ID NO: 359 - DNA, 129 bp, Artificial Sequence
  X4 linker (IgG1 and IgG2 modified hinge region) sequence
gacaagacgcacaccaagccacctaaaccagctccagaactgctcggaggtcctggcaccggaaccggaggacctaccatcaaaccacctaagccacctaagcctgctcctaacctgctcggaggacct

SEQ ID NO: 360 - protein, 43 aa, Artificial Sequence
  X4 linker (IgG1 and IgG2 modified hinge region) sequence
DKTHTKPPKPAPELLGGPGTGTGGPTIKPPKPPKPAPNLLGGP

SEQ ID NO: 361 - DNA, 63 bp, Artificial Sequence
  CD3 zeta transmembrane domain sequence
ctctgctacctgctggatggaatcctcttcatctatggtgtcattctcactgccttgttcctg

SEQ ID NO: 362 - protein, 21 aa, Artificial Sequence
  CD3 zeta transmembrane domain sequence
LCYLLDGILFIYGVILTALFL

SEQ ID NO: 363 - DNA, 72 bp, Artificial Sequence
  CD8 transmembrane domain sequence
atctacatttgggccccgctcgcaggcacatgtggagtgctcctcctctccctggtgattaccctgtactgc

SEQ ID NO: 364 - protein, 24 aa, Artificial Sequence
  CD8 transmembrane domain sequence
IYIWAPLAGTCGVLLLSLVITLYC

SEQ ID NO: 365 - DNA, 66 bp, Artificial Sequence
  CD4 transmembrane domain sequence
atggccctgattgtgctggggggcgtcgccggcctcctgcttttcattgggctaggcatcttcttc

SEQ ID NO: 366 - protein, 22 aa, Artificial Sequence
  CD4 transmembrane domain sequence
MALIVLGGVAGLLLFIGLGIFF

SEQ ID NO: 367 - DNA, 81 bp, Artificial Sequence
  CD28 transmembrane domain sequence
ttttgggtgctggtggtggttggtggagtcctggcttgctatagcttgctagtaacagtggcctttattattttctgggtg

SEQ ID NO: 368 - protein, 27 aa, Artificial Sequence
  CD28 transmembrane domain sequence
FWVLVVVGGVLACYSLLVTVAFIIFWV

SEQ ID NO: 369 - DNA, 81 bp, Artificial Sequence
  4-1BB transmembrane domain sequence
atcatctccttctttcttgcgctgacgtcgactgcgttgctcttcctgctgttcttcctcacgctccgtttctctgttgtt

SEQ ID NO: 370 - protein, 27 aa, Artificial Sequence
  4-1BB transmembrane domain sequence
IISFFLALTSTALLFLLFFLTLRFSVV

SEQ ID NO: 371 - DNA, 78 bp, Artificial Sequence
  OX40 transmembrane domain sequence
gttgccgccatcctgggcctgggcctggtgctggggctgctgggccccctggccatcctgctggccctgtacctgctc

SEQ ID NO: 372 - protein, 26 aa, Artificial Sequence
  OX40 transmembrane domain sequence
VAAILGLGLVLGLLGPLAILLALYLL

SEQ ID NO: 373 - DNA, 336 bp, Artificial Sequence
  CD3 zeta domain sequence
cgcgttaagttctcccgatcagccgacgcgcctgcttacaagcagggccagaaccaactgtacaacgagctgaatctcggtagacgggaagagtacgacgtgttggacaaacggagaggccgcgacccagaaatgggcggcaagcctcgcaggaaaaacccccaggagggactgtacaatgagttgcagaaagataagatggcagaagcttatagcgagatcggaatgaagggggaaaggagacgagggaaaggacacgacggcctttatcagggcctgtccacagcaacaaaagatacgtatgacgccctccatatgcaggcacttccaccacgg

SEQ ID NO: 374 - protein, 112 aa, Artificial Sequence
  CD3 zeta domain sequence
RVKFSRSADAPAYKQGQNQLYNELNLGRREEYDVLDKRRGRDPEMGGKPRRKNPQEGLYNELQKDKMAEAYSEIGMKGERRRGKGHDGLYQGLSTATKDTYDALHMQALPPR

SEQ ID NO: 375 - DNA, 336 bp, Artificial Sequence
  CD3 zeta domain variant sequence
agagtgaagttcagcaggagcgcagacgcccccgcgtaccagcagggccagaaccagctctataacgagctcaatctaggacgaagagaggagtacgatgttttggacaagagacgtggccgggaccctgagatggggggaaagccgagaaggaagaaccctcaggaaggcctgtacaatgaactgcagaaagataagatggcggaggcctacagtgagattgggatgaaaggcgagcgccggaggggcaaggggcacgatggcctttaccagggtctcagtacagccaccaaggacacctacgacgcccttcacatgcaggccctgccccctcgc

SEQ ID NO: 376 - protein, 112 aa, Artificial Sequence
  CD3 zeta domain variant sequence
RVKFSRSADAPAYQQGQNQLYNELNLGRREEYDVLDKRRGRDPEMGGKPRRKNPQEGLYNELQKDKMAEAYSEIGMKGERRRGKGHDGLYQGLSTATKDTYDALHMQALPPR

SEQ ID NO: 377 - DNA, 123 bp, Artificial Sequence
  CD28 domain sequence
agaagcaagcggtctcggctcctgcattctgattacatgaacatgaccccaagaagaccaggccccaccaggaaacattaccagccctacgctccgccacgcgacttcgctgcctaccggtcc

SEQ ID NO: 378 - protein, 41 aa, Artificial Sequence
  CD28 domain sequence
RSKRSRLLHSDYMNMTPRRPGPTRKHYQPYAPPRDFAAYRS

SEQ ID NO: 379 - DNA, 126 bp, Artificial Sequence
  4-1BB domain sequence
aaaaggggccgcaaaaaactcctttacatttttaagcagccttttatgaggccagtacagacgactcaagaggaagacgggtgctcatgccgctttcctgaggaggaggaaggagggtgcgaactg

SEQ ID NO: 380 - protein, 42 aa, Artificial Sequence
  4-1BB domain sequence
KRGRKKLLYIFKQPFMRPVQTTQEEDGCSCRFPEEEEGGCEL

SEQ ID NO: 381 - DNA, 111 bp, Artificial Sequence
  OX40 domain sequence
cggagggaccagaggctgccccccgatgcccacaagccccctgggggaggcagtttccggacccccatccaagaggagcaggccgacgcccactccaccctggccaagatc

SEQ ID NO: 382 - protein, 37 aa, Artificial Sequence
  OX40 domain sequence
RRDQRLPPDAHKPPGGGSFRTPIQEEQADAHSTLAKI

SEQ ID NO: 383 - DNA, 723 bp, Artificial Sequence
  Humanized anti CD3 scFV clone 12F6 (VH-VL) sequence
caggtgcagctggtgcagagcggaggtggagtggtccaacctggaagatctctgagactgagctgtaaggctagcgggtacacgttcacatcttacacgatgcactgggtgaggcaagcccccggtaagggcctggaatggatcggatatataaaccccagctcagggtataccaaatataatcagaagttcaaagatcggttcacgatttctgctgataaaagtaagtccaccgctttcctgcagatggactcactcaggccagaagatactggtgtttatttctgtgcaaggtggcaggactacgacgtgtactttgactattgggggcaggggacgcctgtaacagtatcaagcggcggtggcggatccggcggtggcggatccggcggtggcggatccgatattcagatgacccagagcccgagcagcctgagcgcgagcgtgggcgatcgcgtgaccatgacctgccgcgcgagcagcagcgtgagctatatgcattggtatcagcagaccccgggcaaagcgccgaaaccgtggatttatgcgaccagcaacctggcgagcggcgtgccgagccgctttagcggcagcggcagcggcaccgattataccctgaccattagcagcctgcagccggaagatattgcgacctattattgccagcagtggagcagcaacccgccgacctttggccagggcaccaaactgcagattacccgc

SEQ ID NO: 384 - protein, 241 aa, Artificial Sequence
  Humanized anti CD3 scFV clone 12F6 (VH-VL) sequence
QVQLVQSGGGVVQPGRSLRLSCKASGYTFTSYTMHWVRQAPGKGLEWIGYINPSSGYTKYNQKFKDRFTISADKSKSTAFLQMDSLRPEDTGVYFCARWQDYDVYFDYWGQGTPVTVSSGGGGSGGGGSGGGGSDIQMTQSPSSLSASVGDRVTMTCRASSSVSYMHWYQQTPGKAPKPWIYATSNLASGVPSRFSGSGSGTDYTLTISSLQPEDIATYYCQQWSSNPPTFGQGTKLQITR

SEQ ID NO: 385 - DNA, 723 bp, Artificial Sequence
  Humanized anti CD3 scFV clone 12F6 (VL-VH) sequence
gatattcagatgacccagagcccgagcagcctgagcgcgagcgtgggcgatcgcgtgaccatgacctgccgcgcgagcagcagcgtgagctatatgcattggtatcagcagaccccgggcaaagcgccgaaaccgtggatttatgcgaccagcaacctggcgagcggcgtgccgagccgctttagcggcagcggcagcggcaccgattataccctgaccattagcagcctgcagccggaagatattgcgacctattattgccagcagtggagcagcaacccgccgacctttggccagggcaccaaactgcagattacccgcggcggtggcggatccggcggtggcggatccggcggtggcggatcccaggtgcagctggtgcagagcggaggtggagtggtccaacctggaagatctctgagactgagctgtaaggctagcgggtacacgttcacatcttacacgatgcactgggtgaggcaagcccccggtaagggcctggaatggatcggatatataaaccccagctcagggtataccaaatataatcagaagttcaaagatcggttcacgatttctgctgataaaagtaagtccaccgctttcctgcagatggactcactcaggccagaagatactggtgtttatttctgtgcaaggtggcaggactacgacgtgtactttgactattgggggcaggggacgcctgtaacagtatcaagc

SEQ ID NO: 386 - protein, 241 aa, Artificial Sequence
  Humanized anti CD3 scFV clone 12F6 (VL-VH) sequence
DIQMTQSPSSLSASVGDRVTMTCRASSSVSYMHWYQQTPGKAPKPWIYATSNLASGVPSRFSGSGSGTDYTLTISSLQPEDIATYYCQQWSSNPPTFGQGTKLQITRGGGGSGGGGSGGGGSQVQLVQSGGGVVQPGRSLRLSCKASGYTFTSYTMHWVRQAPGKGLEWIGYINPSSGYTKYNQKFKDRFTISADKSKSTAFLQMDSLRPEDTGVYFCARWQDYDVYFDYWGQGTPVTVSS

SEQ ID NO: 387 - DNA, 723 bp, Artificial Sequence
  Humanized anti CD3 scFV clone OKT3 (VH-VL) sequence
caggtgcagctggtgcagagcggaggcggagtggtgcagcctggaagaagcctgcgcctgagctgcaaagcgagcggctatacctttacccgctataccatgcattgggtgcgccaggcgccgggcaaaggcctggaatggattggctatattaacccgagccgcggctataccaactataaccagaaagtgaaagatcgctttaccattagcaccgataaaagcaaaagcaccgcgtttctgcagatggatagcctgcgcccggaagataccgcggtgtattattgcgcgcgctattatgatgatcattattgcctggattattggggccagggcaccaccctgaccgtgagcagcggcggtggcggatccggcggtggcggatccggcggtggcggatccgatattcagatgacccagagcccgagcagcctgagcgcgagcgtgggcgatcgcgtgaccattacctgcagcgcgagcagcagcgtgagctatatgaactggtatcagcagaccccgggcaaagcgccgaaacgctggatttatgataccagcaaactggcgagcggcgtgccgagccgctttagcggcagcggcagcggcaccgattatacctttaccattagcagcctgcagccggaagatattgcgacctattattgccagcagtggagcagcaacccgtttacctttggccagggcaccaaactgcagattacccgc

SEQ ID NO: 388 - protein, 241 aa, Artificial Sequence
  Humanized anti CD3 scFV clone OKT3 (VH-VL) sequence
QVQLVQSGGGVVQPGRSLRLSCKASGYTFTRYTMHWVRQAPGKGLEWIGYINPSRGYTNYNQKVKDRFTISTDKSKSTAFLQMDSLRPEDTAVYYCARYYDDHYCLDYWGQGTTLTVSSGGGGSGGGGSGGGGSDIQMTQSPSSLSASVGDRVTITCSASSSVSYMNWYQQTPGKAPKRWIYDTSKLASGVPSRFSGSGSGTDYTFTISSLQPEDIATYYCQQWSSNPFTFGQGTKLQITR

SEQ ID NO: 389 - DNA, 723 bp, Artificial Sequence
  Humanized anti CD3 scFV clone OKT3 (VH-VL) sequence
gatattcagatgacccagagcccgagcagcctgagcgcgagcgtgggcgatcgcgtgaccattacctgcagcgcgagcagcagcgtgagctatatgaactggtatcagcagaccccgggcaaagcgccgaaacgctggatttatgataccagcaaactggcgagcggcgtgccgagccgctttagcggcagcggcagcggcaccgattatacctttaccattagcagcctgcagccggaagatattgcgacctattattgccagcagtggagcagcaacccgtttacctttggccagggcaccaaactgcagattacccgcggcggtggcggatccggcggtggcggatccggcggtggcggatcccaggtgcagctggtgcagagcggaggcggagtggtgcagcctggaagaagcctgcgcctgagctgcaaagcgagcggctatacctttacccgctataccatgcattgggtgcgccaggcgccgggcaaaggcctggaatggattggctatattaacccgagccgcggctataccaactataaccagaaagtgaaagatcgctttaccattagcaccgataaaagcaaaagcaccgcgtttctgcagatggatagcctgcgcccggaagataccgcggtgtattattgcgcgcgctattatgatgatcattattgcctggattattggggccagggcaccaccctgaccgtgagcagc

SEQ ID NO: 390 - protein, 241 aa, Artificial Sequence
  Humanized anti CD3 scFV clone OKT3 (VH-VL) sequence
DIQMTQSPSSLSASVGDRVTITCSASSSVSYMNWYQQTPGKAPKRWIYDTSKLASGVPSRFSGSGSGTDYTFTISSLQPEDIATYYCQQWSSNPFTFGQGTKLQITRGGGGSGGGGSGGGGSQVQLVQSGGGVVQPGRSLRLSCKASGYTFTRYTMHWVRQAPGKGLEWIGYINPSRGYTNYNQKVKDRFTISTDKSKSTAFLQMDSLRPEDTAVYYCARYYDDHYCLDYWGQGTTLTVSS

SEQ ID NO: 391 - DNA, 729 bp, Artificial Sequence; identical to SEQ ID NO: 232
  HumanizeE6 scFV (VH-VL) sequence

SEQ ID NO: 392 - protein, 243 aa, Artificial Sequence; identical to SEQ ID NO: 233
  HumanizeE6 scFV (VH-VL) sequence

SEQ ID NO: 393 - DNA, 729 bp, Artificial Sequence
  HumanizeE6 scFV (VL-VH) sequence
gaaattgtgttgacacagtctccagccaccctgtctttgtctccaggggaaagagccaccctcacctgcagcgccaccagcagtgttagctacatccactggtaccaacagaggcctggccagagccccaggctcctcatctatagcacctccaacctggccagcggcatcccagccaggttcagtggcagtgggtctgggagcgactacactctcaccatcagcagcctagagcctgaagattttgcagtttattactgtcagcagcgtagcagctcccctttcacctttggcagcggcaccaaagtggaaattaaaggcggtggcggatccggcggtggcggatccggcggtggcggatccgaggtgcagctggtggagtctgggggaggcctggtcaagcctggggggtccctgagactctcctgtgcagcctctggattcaccttcagtaggtatggcatgagctgggtccgccaggctccagggaagaggctggagtgggtctcaaccattagtggcggaggcacctacatatactacccagactcagtgaagggccgattcaccatctccagagacaacgccaagaacaccctgtatctgcaaatgaacagcctgagagccgaggacacggctgtgtattactgtaccagagataactatggccgcaactatgattatggcatggattattggggccagggcaccctggtgaccgtgagcagc

SEQ ID NO: 394 - protein, 243 aa, Artificial Sequence
  HumanizeE6 scFV (VL-VH) sequence
EIVLTQSPATLSLSPGERATLTCSATSSVSYIHWYQQRPGQSPRLLIYSTSNLASGIPARFSGSGSGSDYTLTISSLEPEDFAVYYCQQRSSSPFTFGSGTKVEIKGGGGSGGGGSGGGGSEVQLVESGGGLVKPGGSLRLSCAASGFTFSRYGMSWVRQAPGKRLEWVSTISGGGTYIYYPDSVKGRFTISRDNAKNTLYLQMNSLRAEDTAVYYCTRDNYGRNYDYGMDYWGQGTLVTVSS

SEQ ID NO: 395 - DNA, 747 bp, Artificial Sequence; identical to SEQ ID NO: 238
  HumanizeC2 scFV (VH-VL) sequence

SEQ ID NO: 396 - protein, 249 aa, Artificial Sequence; identical to SEQ ID NO: 239
  HumanizeC2 scFV (VH-VL) sequence

SEQ ID NO: 397 - DNA, 747 bp, Artificial Sequence
  HumanizeE6 scFV (VL-VH) sequence
gacattgtgctgacccagtctccagcctccttggccgtgtctccaggacagagggccaccatcacctgcagagccagtaagagtgtcagtaccagcggatactcctacatgcactggtatcagcagaaaccaggacaacctcctaaactcctgatttacctggcatccaatctggagagcggggtcccagccaggttcagcggcagtgggtctgggaccgatttcaccctcacaattaatcctgtggaagctaatgatactgcaaattattactgtcagcacagtagggagctgcctttcacattcggcggagggaccaaggtggagatcaaacgaactggcggtggcggatccggcggtggcggatccggcggtggcggatccgaggtgcagctggtggagtctgggggaggcctggtcaagcctggggggtccctgagactctcctgtgcagcctctggattcaccttcagtggctatgccatgagctgggtccgccaggctccagggaaggggctggagtgggtctcaaccattagtagtggcggaacctacatatactaccccgactcagtgaagggccgattcaccatctccagagacaacgccaagaactcactgtatctgcaaatgaacagcctgagagccgaggacacggccgtgtattactgtgcgagacttgggggggataattactacgaatacttcgatgtctggggcaaagggaccacggtcaccgtctcctcc

SEQ ID NO: 398 - protein, 249 aa, Artificial Sequence
  HumanizeE6 scFV (VL-VH) sequence
DIVLTQSPASLAVSPGQRATITCRASKSVSTSGYSYMHWYQQKPGQPPKLLIYLASNLESGVPARFSGSGSGTDFTLTINPVEANDTANYYCQHSRELPFTFGGGTKVEIKRTGGGGSGGGGSGGGGSEVQLVESGGGLVKPGGSLRLSCAASGFTFSGYAMSWVRQAPGKGLEWVSTISSGGTYIYYPDSVKGRFTISRDNAKNSLYLQMNSLRAEDTAVYYCARLGGDNYYEYFDVWGKGTTVTVSS

SEQ ID NO: 399 - DNA, 15 bp, Artificial Sequence
  G4S1 linker sequence
ggcggtggcggatcc

SEQ ID NO: 400 - protein, 5 aa, Artificial Sequence
  G4S1 linker sequence
GGGGS

SEQ ID NO: 401 - DNA, 45 bp, Artificial Sequence
  [G4S1]x3 linker sequence
ggcggtggcggatccggcggtggcggatccggcggtggcggatcc

SEQ ID NO: 402 - protein, 15 aa, Artificial Sequence
  [G4S1]x3 linker sequence
GGGGSGGGGSGGGGS

SEQ ID NO: 403 - DNA, 24 bp, Artificial Sequence
  8 aa GS linker sequence
ggcggttccggcggtggatccgga

SEQ ID NO: 404 - protein, 8 aa, Artificial Sequence
  8 aa GS linker sequence
GGSGGGSG

SEQ ID NO: 405 - DNA, 39 bp, Artificial Sequence
  12 aa GS linker sequence
ggcggttccggcggtggatccggcggtggcggatccgga

SEQ ID NO: 406 - protein, 12 aa, Artificial Sequence
  12 aa GS linker sequence
GGSGGGSGGGSG

SEQ ID NO: 407 - DNA, 39 bp, Artificial Sequence
  13 aa GS linker sequence
ggcggtggatccggcggtggcggatccggcggtggatcc

SEQ ID NO: 408 - protein, 13 aa, Artificial Sequence
  13 aa GS linker sequence
GGGSGGGGSGGGS

SEQ ID NO: 409 - DNA, 66 bp, Artificial Sequence
  22 aa GS linker sequence
ggcggtggaagcggcggtggcggatccggcagcggcggaagcggcggtggcggatccggcggtgga

SEQ ID NO: 410 - protein, 22 aa, Artificial Sequence
  22 aa GS linker sequence
GGGSGGGGSGSGGSGGGGSGGG

SEQ ID NO: 411 - DNA, 78 bp, Artificial Sequence
  24 aa GS linker sequence
ggcggttccggcggtggatccggcggtggcggatccggaggcggttccggcggtggatccggcggtggcggatccgga

SEQ ID NO: 412 - protein, 24 aa, Artificial Sequence
  24 aa GS linker sequence
GGSGGGSGGGSGGGSGGGSGGGSG

SEQ ID NO: 413 - DNA, 357 bp, Artificial Sequence
  Mouse C3 Heavy chain variable region sequence
caggtccagctgcagcagtctgggcctgagctggtgaggcctggggtctcagtgaagatttcctgcaagggttccggctacagattcactgattatgctatgaactgggtgaagcagagtcatgcaaagagtctagagtggattggagttattagtactttctctggtaatacaaacttcaaccagaagtttaagggcaaggccacaatgactgtagacaaatcctccagcacagcctatatggaacttgccagattgacatctgaggattctgccatgtattactgtgcaagatcggattactacggcccatactttgactactggggccaaggcaccactctcacagtctcctca

SEQ ID NO: 414 - protein, 119 aa, Artificial Sequence
  Mouse C3 Heavy chain variable region sequence
QVQLQQSGPELVRPGVSVKISCKGSGYRFTDYAMNWVKQSHAKSLEWIGVISTFSGNTNFNQKFKGKATMTVDKSSSTAYMELARLTSEDSAMYYCARSDYYGPYFDYWGQGTTLTVSS

SEQ ID NO: 415 - DNA, 90 bp, Artificial Sequence
  Mouse C3 heavy chain variable framework region 1 (FWR1) sequence
caggtccagctgcagcagtctgggcctgagctggtgaggcctggggtctcagtgaagatttcctgcaagggttccggctacagattcact

SEQ ID NO: 416 - protein, 30 aa, Artificial Sequence
  Mouse C3 heavy chain variable framework region 1 (FWR1) sequence
QVQLQQSGPELVRPGVSVKISCKGSGYRFT

SEQ ID NO: 417 - DNA, 15 bp, Artificial Sequence
  Mouse C3 heavy chain variable complementarity determining regions 1 (CDR1) sequence
gattatgctatgaac

SEQ ID NO: 418 - protein, 5 aa, Artificial Sequence
  Mouse C3 heavy chain variable complementarity determining regions 1 (CDR1) sequence
DYAMN

SEQ ID NO: 419 - DNA, 42 bp, Artificial Sequence
  Mouse C3 heavy chain variable framework region 2 (FWR2) sequence
tgggtgaagcagagtcatgcaaagagtctagagtggattgga

SEQ ID NO: 420 - protein, 14 aa, Artificial Sequence
  Mouse C3 heavy chain variable framework region 2 (FWR2) sequence
WVKQSHAKSLEWIG

SEQ ID NO: 421 - DNA, 51 bp, Artificial Sequence
  Mouse C3 heavy chain variable complementarity determining regions 2 (CDR2) sequence
gttattagtactttctctggtaatacaaacttcaaccagaagtttaagggc

SEQ ID NO: 422 - protein, 17 aa, Artificial Sequence
  Mouse C3 heavy chain variable complementarity determining regions 2 (CDR2) sequence
VISTFSGNTNFNQKFKG

SEQ ID NO: 423 - DNA, 96 bp, Artificial Sequence
  Mouse C3 heavy chain variable framework region 3 (FWR3) acid sequence
aaggccacaatgactgtagacaaatcctccagcacagcctatatggaacttgccagattgacatctgaggattctgccatgtattactgtgcaaga

SEQ ID NO: 424 - protein, 32 aa, Artificial Sequence
  Mouse C3 heavy chain variable framework region 3 (FWR3) acid sequence
KATMTVDKSSSTAYMELARLTSEDSAMYYCAR

SEQ ID NO: 425 - DNA, 30 bp, Artificial Sequence
  Mouse C3 heavy chain variable complementarity determining regions 3 (CDR3) sequence
tcggattactacggcccatactttgactac

SEQ ID NO: 426 - protein, 10 aa, Artificial Sequence
  Mouse C3 heavy chain variable complementarity determining regions 3 (CDR3) sequence
SDYYGPYFDY

SEQ ID NO: 427 - DNA, 296 bp, Artificial Sequence
  IGHV1-18*04 heavy chain variable region sequence
caggttcagctggtgcagtctggagctgaggtgaagaagcctggggcctcagtgaaggtctcctgcaaggcttctggttacacctttaccagctacggtatcagctgggtgcgacaggcccctggacaagggcttgagtggatgggatggatcagcgcttacaatggtaacacaaactatgcacagaagctccagggcagagtcaccatgaccacagacacatccacgagcacagcctacatggagctgaggagcctgagatctgacgacacggccgtgtattactgtgcgagaga

SEQ ID NO: 428 - protein, 98 aa, Artificial Sequence
  IGHV1-18*04 heavy chain variable region sequence
QVQLVQSGAEVKKPGASVKVSCKASGYTFTSYGISWVRQAPGQGLEWMGWISAYNGNTNYAQKLQGRVTMTTDTSTSTAYMELRSLRSDDTAVYYCAR

SEQ ID NO: 429 - DNA, 90 bp, Artificial Sequence
  IGHV1-18*04 heavy chain variable framework region 1 (FWR1) sequence
caggttcagctggtgcagtctggagctgaggtgaagaagcctggggcctcagtgaaggtctcctgcaaggcttctggttacacctttacc

SEQ ID NO: 430 - protein, 30 aa, Artificial Sequence
  IGHV1-18*04 heavy chain variable framework region 1 (FWR1) sequence
QVQLVQSGAEVKKPGASVKVSCKASGYTFT

SEQ ID NO: 431 - DNA, 15 bp, Artificial Sequence
  IGHV1-18*04 heavy chain variable complementarity determining regions 1 (CDR1) sequence
agctacggtatcagc

SEQ ID NO: 432 - protein, 5 aa, Artificial Sequence
  IGHV1-18*04 heavy chain variable complementarity determining regions 1 (CDR1) sequence
SYGIS

SEQ ID NO: 433 - DNA, 42 bp, Artificial Sequence
  IGHV1-18*04 heavy chain variable framework region 2 (FWR2) sequence
tgggtgcgacaggcccctggacaagggcttgagtggatggga

SEQ ID NO: 434 - protein, 14 aa, Artificial Sequence
  IGHV1-18*04 heavy chain variable framework region 2 (FWR2) sequence
WVRQAPGQGLEWMG

SEQ ID NO: 435 - DNA, 51 bp, Artificial Sequence
  IGHV1-18*04 heavy chain variable complementarity determining regions 2 (CDR2) sequence
tggatcagcgcttacaatggtaacacaaactatgcacagaagctccagggc

SEQ ID NO: 436 - protein, 17 aa, Artificial Sequence
  IGHV1-18*04 heavy chain variable complementarity determining regions 2 (CDR2) sequence
WISAYNGNTNYAQKLQG

SEQ ID NO: 437 - DNA, 96 bp, Artificial Sequence
  IGHV1-18*04 heavy chain variable framework region 3 (FWR3) sequence
agagtcaccatgaccacagacacatccacgagcacagcctacatggagctgaggagcctgagatctgacgacacggccgtgtattactgtgcgaga

SEQ ID NO: 438 - protein, 32 aa, Artificial Sequence
  IGHV1-18*04 heavy chain variable framework region 3 (FWR3) sequence
RVTMTTDTSTSTAYMELRSLRSDDTAVYYCAR

SEQ ID NO: 439 - DNA, 357 bp, Artificial Sequence
  Humanized C3 heavy chain variable region sequence
caggttcagctggtgcagtctggagctgaggtgaagaagcctggggcctcagtgaaggtctcctgcaaggcttctggttacacctttaccgactacgccatgaactgggtgcgacaggcccctggacaagggcttgagtggatgggagtgatcagcaccttcagcggtaacacaaacttcaaccagaagttcaagggcagagtcaccatgaccacagacacatccacgagcacagcctacatggagctgaggagcctgagatctgacgacacggccgtgtattactgtgcgagaagcgactactacggcccatacttcgactactggggccagggcaccaccctgaccgtgtccagc

SEQ ID NO: 440 - protein, 119 aa, Artificial Sequence
  Humanized C3 heavy chain variable region sequence
QVQLVQSGAEVKKPGASVKVSCKASGYTFTDYAMNWVRQAPGQGLEWMGVISTFSGNTNFNQKFKGRVTMTTDTSTSTAYMELRSLRSDDTAVYYCARSDYYGPYFDYWGQGTTLTVSS

SEQ ID NO: 441 - DNA, 90 bp, Artificial Sequence; identical to SEQ ID NO: 429
  Humanized C3 heavy chain variable framework region 1 (FWR1) acid sequence

SEQ ID NO: 442 - protein, 30 aa, Artificial Sequence; identical to SEQ ID NO: 430
  Humanized C3 heavy chain variable framework region 1 (FWR1) acid sequence

SEQ ID NO: 443 - DNA, 15 bp, Artificial Sequence
  Humanized C3 heavy chain variable complementarity determining regions 1 (CDR1) sequence
gactacgccatgaac

SEQ ID NO: 444 - protein, 5 aa, Artificial Sequence
  Humanized C3 heavy chain variable complementarity determining regions 1 (CDR1) sequence
DYAMN

SEQ ID NO: 445 - DNA, 42 bp, Artificial Sequence; identical to SEQ ID NO: 433
  Humanized C3 heavy chain variable framework region 2 (FWR2) acid sequence

SEQ ID NO: 446 - protein, 14 aa, Artificial Sequence
  Humanized C3 heavy chain variable framework region 2 (FWR2) acid sequence
WVRQAPGQGLEWMG

SEQ ID NO: 447 - DNA, 51 bp, Artificial Sequence
  Humanized C3 heavy chain variable complementarity determining regions 2 (CDR2) sequence
gtgatcagcaccttcagcggtaacacaaacttcaaccagaagttcaagggc

SEQ ID NO: 448 - protein, 17 aa, Artificial Sequence
  Humanized C3 heavy chain variable complementarity determining regions 2 (CDR2) sequence
VISTFSGNTNFNQKFKG

SEQ ID NO: 449 - DNA, 96 bp, Artificial Sequence; identical to SEQ ID NO: 437
  Humanized C3 heavy chain variable framework region 3 (FWR3) acid sequence

SEQ ID NO: 450 - protein, 32 aa, Artificial Sequence; identical to SEQ ID NO: 438
  Humanized C3 heavy chain variable framework region 3 (FWR3) acid sequence

SEQ ID NO: 451 - DNA, 30 bp, Artificial Sequence
  Humanized C3 heavy chain variable complementarity determining regions 3 (CDR3) sequence
agcgactactacggcccatacttcgactac

SEQ ID NO: 452 - protein, 10 aa, Artificial Sequence
  Humanized C3 heavy chain variable complementarity determining regions 3 (CDR3) sequence
SDYYGPYFDY

SEQ ID NO: 453 - DNA, 1353 bp, Artificial Sequence
  Humanized C3 IgG1 heavy chain sequence
caggttcagctggtgcagtctggagctgaggtgaagaagcctggggcctcagtgaaggtctcctgcaaggcttctggttacacctttaccgactacgccatgaactgggtgcgacaggcccctggacaagggcttgagtggatgggagtgatcagcaccttcagcggtaacacaaacttcaaccagaagttcaagggcagagtcaccatgaccacagacacatccacgagcacagcctacatggagctgaggagcctgagatctgacgacacggccgtgtattactgtgcgagaagcgactactacggcccatacttcgactactggggccagggcaccaccctgaccgtgtccagcgctagcaccaagggcccatcggtcttccccctggcaccctcctccaagagcacctctgggggcacagcggccctgggctgcctggtcaaggactacttccccgaaccggtgacggtgtcgtggaactcaggcgccctgaccagcggcgtgcacaccttcccggctgtcctacagtcctcaggactctactccctcagcagcgtggtgacagtgccctccagcagcttgggcacccagacctacatctgcaacgtgaatcacaagcccagcaacaccaaggtggacaagaaagttgagcccaaatcttgtgacaaaactcacacatgcccaccgtgcccagcacctgaactcctggggggaccgtcagtcttcctcttccccccaaaacccaaggacaccctcatgatctcccggacccctgaggtcacatgcgtggtggtggacgtgagccacgaagaccctgaggtcaagttcaactggtacgtggacggcgtggaggtgcataatgccaagacaaagccgcgggaggagcagtacaacagcacgtaccgtgtggtcagcgtcctcaccgtcctgcaccaggactggctgaatggcaaggagtacaagtgcaaggtctccaacaaagccctcccagcccccatcgagaaaaccatctccaaagccaaagggcagccccgagaaccacaggtgtacaccctgcccccatcccgggaggagatgaccaagaaccaggtcagcctgacctgcctggtcaaaggcttctatcccagcgacatcgccgtggagtgggagagcaatgggcagccggagaacaactacaagaccacgcctcccgtgctggactccgacggctccttcttcctctacagcaagctcaccgtggacaagagcaggtggcagcaggggaacgtcttctcatgctccgtgatgcatgaggctctgcacaaccactacacgcagaagagcctctccctgtctccgggtaaatgataa

SEQ ID NO: 454 - protein, 449 aa, Artificial Sequence
  Humanized C3 IgG1 heavy chain sequence
QVQLVQSGAEVKKPGASVKVSCKASGYTFTDYAMNWVRQAPGQGLEWMGVISTFSGNTNFNQKFKGRVTMTTDTSTSTAYMELRSLRSDDTAVYYCARSDYYGPYFDYWGQGTTLTVSSASTKGPSVFPLAPSSKSTSGGTAALGCLVKDYFPEPVTVSWNSGALTSGVHTFPAVLQSSGLYSLSSVVTVPSSSLGTQTYICNVNHKPSNTKVDKKVEPKSCDKTHTCPPCPAPELLGGPSVFLFPPKPKDTLMISRTPEVTCVVVDVSHEDPEVKFNWYVDGVEVHNAKTKPREEQYNSTYRVVSVLTVLHQDWLNGKEYKCKVSNKALPAPIEKTISKAKGQPREPQVYTLPPSREEMTKNQVSLTCLVKGFYPSDIAVEWESNGQPENNYKTTPPVLDSDGSFFLYSKLTVDKSRWQQGNVFSCSVMHEALHNHYTQKSLSLSPGK

SEQ ID NO: 455 - DNA, 1341 bp, Artificial Sequence
  Humanized C3 IgG2 heavy chain sequence
caggttcagctggtgcagtctggagctgaggtgaagaagcctggggcctcagtgaaggtctcctgcaaggcttctggttacacctttaccgactacgccatgaactgggtgcgacaggcccctggacaagggcttgagtggatgggagtgatcagcaccttcagcggtaacacaaacttcaaccagaagttcaagggcagagtcaccatgaccacagacacatccacgagcacagcctacatggagctgaggagcctgagatctgacgacacggccgtgtattactgtgcgagaagcgactactacggcccatacttcgactactggggccagggcaccaccctgaccgtgtccagcgcctccaccaagggcccatcggtcttccccctggcgccctgctccaggagcacctccgagagcacagccgccctgggctgcctggtcaaggactacttccccgaaccggtgacggtgtcgtggaactcaggcgctctgaccagcggcgtgcacaccttcccagctgtcctacagtcctcaggactctactccctcagcagcgtggtgaccgtgccctccagcaacttcggcacccagacctacacctgcaacgtagatcacaagcccagcaacaccaaggtggacaagacagttgagcgcaaatgttgtgtcgagtgcccaccgtgcccagcaccacctgtggcaggaccgtcagtcttcctcttccccccaaaacccaaggacaccctcatgatctcccggacccctgaggtcacgtgcgtggtggtggacgtgagccacgaagaccccgaggtccagttcaactggtacgtggacggcgtggaggtgcataatgccaagacaaagccacgggaggagcagttcaacagcacgttccgtgtggtcagcgtcctcaccgttgtgcaccaggactggctgaacggcaaggagtacaagtgcaaggtctccaacaaaggcctcccagcccccatcgagaaaaccatctccaaaaccaaagggcagccccgagaaccacaggtgtacaccctgcccccatcccgggaggagatgaccaagaaccaggtcagcctgacctgcctggtcaaaggcttctaccccagcgacatcgccgtggagtgggagagcaatgggcagccggagaacaactacaagaccacacctcccatgctggactccgacggctccttcttcctctacagcaagctcaccgtggacaagagcaggtggcagcaggggaacgtcttctcatgctccgtgatgcatgaggctctgcacaaccactacacgcagaagagcctctccctgtctccgggtaaatagtaa

SEQ ID NO: 456 - protein, 445 aa, Artificial Sequence
  Humanized C3 IgG2 heavy chain sequence
QVQLVQSGAEVKKPGASVKVSCKASGYTFTDYAMNWVRQAPGQGLEWMGVISTFSGNTNFNQKFKGRVTMTTDTSTSTAYMELRSLRSDDTAVYYCARSDYYGPYFDYWGQGTTLTVSSASTKGPSVFPLAPCSRSTSESTAALGCLVKDYFPEPVTVSWNSGALTSGVHTFPAVLQSSGLYSLSSVVTVPSSNFGTQTYTCNVDHKPSNTKVDKTVERKCCVECPPCPAPPVAGPSVFLFPPKPKDTLMISRTPEVTCVVVDVSHEDPEVQFNWYVDGVEVHNAKTKPREEQFNSTFRVVSVLTVVHQDWLNGKEYKCKVSNKGLPAPIEKTISKTKGQPREPQVYTLPPSREEMTKNQVSLTCLVKGFYPSDIAVEWESNGQPENNYKTTPPMLDSDGSFFLYSKLTVDKSRWQQGNVFSCSVMHEALHNHYTQKSLSLSPGK

SEQ ID NO: 457 - DNA, 545 bp, Artificial Sequence
  Humanized C3 heavy chain IgG1 gBLOCK sequence
tgctctgggttccaggttccactggtgacgcggcccagccggcccaggttcagctggtgcagtctggagctgaggtgaagaagcctggggcctcagtgaaggtctcctgcaaggcttctggttacacctttaccgactacgccatgaactgggtgcgacaggcccctggacaagggcttgagtggatgggagtgatcagcaccttcagcggtaacacaaacttcaaccagaagttcaagggcagagtcaccatgaccacagacacatccacgagcacagcctacatggagctgaggagcctgagatctgacgacacggccgtgtattactgtgcgagaagcgactactacggcccatacttcgactactggggccagggcaccaccctgaccgtgtccagcgctagcaccaagggcccatcggtcttccccctggcaccctcctccaagagcacctctgggggcacagcggccctgggctgcctggtcaaggactacttccccgaaccggtgacggtgtcgtggaactcaggcgccctgaccagc

SEQ ID NO: 458 - DNA, 336 bp, Artificial Sequence
  Mouse C3 Light Chain variable region sequence
gatgttttgatgacccaaactccactctccctgcctgtcagtcttggagatcaagcctccatctcttgcagatctagtcagaccattgtacatagtaatggaaacacctatttagaatggtacctgcagaaaccaggccagtctccaaagctcctgatctacaaagtttccaaccgattttctggggtcccagacaggttcagtggcagtggatcagggacagatttcacactcaagatcaacagagtggaggctgaggatctgggagtttattactgctttcaaggttcacatgttccattcacgttcggctcggggacaaagttggaaataaaa

SEQ ID NO: 459 - protein, 112 aa, Artificial Sequence
  Mouse C3 Light Chain variable region sequence
DVLMTQTPLSLPVSLGDQASISCRSSQTIVHSNGNTYLEWYLQKPGQSPKLLIYKVSNRFSGVPDRFSGSGSGTDFTLKINRVEAEDLGVYYCFQGSHVPFTFGSGTKLEIK

SEQ ID NO: 460 - DNA, 69 bp, Artificial Sequence
  Mouse C3 light chain variable framework region 1 (FWR1) sequence
gatgttttgatgacccaaactccactctccctgcctgtcagtcttggagatcaagcctccatctcttgc

SEQ ID NO: 461 - protein, 23 aa, Artificial Sequence
  Mouse C3 light chain variable framework region 1 (FWR1) sequence
DVLMTQTPLSLPVSLGDQASISC

SEQ ID NO: 462 - DNA, 48 bp, Artificial Sequence
  Mouse C3 light chain variable complementarity determining regions 1 (CDR1) sequence
agatctagtcagaccattgtacatagtaatggaaacacctatttagaa

SEQ ID NO: 463 - protein, 16 aa, Artificial Sequence
  Mouse C3 light chain variable complementarity determining regions 1 (CDR1) sequence
RSSQTIVHSNGNTYLE

SEQ ID NO: 464 - DNA, 45 bp, Artificial Sequence
  Mouse C3 light chain variable framework region 2 (FWR2) sequence
tggtacctgcagaaaccaggccagtctccaaagctcctgatctac

SEQ ID NO: 465 - protein, 15 aa, Artificial Sequence
  Mouse C3 light chain variable framework region 2 (FWR2) sequence
WYLQKPGQSPKLLIY

SEQ ID NO: 466 - DNA, 21 bp, Artificial Sequence
  Mouse C3 light chain variable complementarity determining regions 2 (CDR2) sequence
aaagtttccaaccgattttct

SEQ ID NO: 467 - protein, 7 aa, Artificial Sequence
  Mouse C3 light chain variable complementarity determining regions 2 (CDR2) sequence
KVSNRFS

SEQ ID NO: 468 - DNA, 96 bp, Artificial Sequence
  Mouse C3 light chain variable framework region 3 (FWR3) sequence
ggggtcccagacaggttcagtggcagtggatcagggacagatttcacactcaagatcaacagagtggaggctgaggatctgggagtttattactgc

SEQ ID NO: 469 - protein, 32 aa, Artificial Sequence
  Mouse C3 light chain variable framework region 3 (FWR3) sequence
GVPDRFSGSGSGTDFTLKINRVEAEDLGVYYC

SEQ ID NO: 470 - DNA, 27 bp, Artificial Sequence
  Mouse C3 light chain variable complementarity determining regions 3 (CDR3) sequence
tttcaaggttcacatgttccattcacg

SEQ ID NO: 471 - protein, 9 aa, Artificial Sequence
  Mouse C3 light chain variable complementarity determining regions 3 (CDR3) sequence
FQGSHVPFT

SEQ ID NO: 472 - DNA, 300 bp, Artificial Sequence
  IGKV2-29*03 light chain variable region sequence
gatattgtgatgacccagactccactctctctgtccgtcacccctggacagccggcctccatctcctgcaagtctagtcagagcctcctgcatagtgatggaaagacctatttgtattggtacctgcagaagccaggccagtctccacagctcctgatctatgaagtttccagccggttctctggagtgccagataggttcagtggcagcgggtcagggacagatttcacactgaaaatcagccgggtggaggctgaggatgttggggtttattactgcatgcaaggtatacaccttcct

SEQ ID NO: 473 - protein, 100 aa, Artificial Sequence
  IGKV2-29*03 light chain variable region sequence
DIVMTQTPLSLSVTPGQPASISCKSSQSLLHSDGKTYLYWYLQKPGQSPQLLIYEVSSRFSGVPDRFSGSGSGTDFTLKISRVEAEDVGVYYCMQGIHLP

SEQ ID NO: 474 - DNA, 69 bp, Artificial Sequence
  IGKV2-29*03 light chain variable framework region 1 (FWR1) acid sequence
gatattgtgatgacccagactccactctctctgtccgtcacccctggacagccggcctccatctcctgc

SEQ ID NO: 475 - protein, 23 aa, Artificial Sequence
  IGKV2-29*03 light chain variable framework region 1 (FWR1) acid sequence
DIVMTQTPLSLSVTPGQPASISC

SEQ ID NO: 476 - DNA, 49 bp, Artificial Sequence
  IGKV2-29*03 light chain variable complementarity determining regions 1 (CDR1) sequence
aagtctagtcagagcctcctgcatagtgatggaaagacctatttsgtat

SEQ ID NO: 477 - protein, 16 aa, Artificial Sequence
  IGKV2-29*03 light chain variable complementarity determining regions 1 (CDR1) sequence
KSSQSLLHSDGKTYLY

SEQ ID NO: 478 - DNA, 45 bp, Artificial Sequence
  IGKV2-29*03 light chain variable framework region 2 (FWR2) sequence
tggtacctgcagaagccaggccagtctccacagctcctgatctat

SEQ ID NO: 479 - protein, 15 aa, Artificial Sequence
  IGKV2-29*03 light chain variable framework region 2 (FWR2) sequence
WYLQKPGQSPQLLIY

SEQ ID NO: 480 - DNA, 18 bp, Artificial Sequence
  IGKV2-29*03 light chain variable complementarity determining regions 2 (CDR2) sequence
gaagtttccagccggttc

SEQ ID NO: 481 - protein, 7 aa, Artificial Sequence
  IGKV2-29*03 light chain variable complementarity determining regions 2 (CDR2) sequence
EVSSRFS

SEQ ID NO: 482 - DNA, 96 bp, Artificial Sequence
  IGKV2-29*03 light chain variable framework region 3 (FWR3) sequence
ggagtgccagataggttcagtggcagcgggtcagggacagatttcacactgaaaatcagccgggtggaggctgaggatgttggggtttattactgc

SEQ ID NO: 483 - protein, 32 aa, Artificial Sequence
  IGKV2-29*03 light chain variable framework region 3 (FWR3) sequence
GVPDRFSGSGSGTDFTLKISRVEAEDVGVYYC

SEQ ID NO: 484 - DNA, 21 bp, Artificial Sequence
  IGKV2-29*03 light chain variable complementarity determining regions3 (CDR3) sequence
atgcaaggtatacaccttcct

SEQ ID NO: 485 - protein, 7 aa, Artificial Sequence
  IGKV2-29*03 light chain variable complementarity determining regions3 (CDR3) sequence
MQGIHLP

SEQ ID NO: 486 - DNA, 342 bp, Artificial Sequence
  Humanized C3 light chain variable region sequence
gatattgtgatgacccagactccactctctctgtccgtcacccctggacagccggcctccatctcctgcaggtctagtcagaccattgtccatagtaatggaaacacctatttggagtggtacctgcagaagccaggccagtctccacagctcctgatctataaggtttccaaccggttctctggagtgccagataggttcagtggcagcgggtcagggacagatttcacactgaaaatcagccgggtggaggctgaggatgttggggtttattactgcttccaaggtagccacgtgcctttcaccttcggcggagggaccaaggtggagatcaaacgaact

SEQ ID NO: 487 - protein, 114 aa, Artificial Sequence
  Humanized C3 light chain variable region sequence
DIVMTQTPLSLSVTPGQPASISCRSSQTIVHSNGNTYLEWYLQKPGQSPQLLIYKVSNRFSGVPDRFSGSGSGTDFTLKISRVEAEDVGVYYCFQGSHVPFTFGGGTKVEIKRT

SEQ ID NO: 488 - DNA, 69 bp, Artificial Sequence; identical to SEQ ID NO: 474
  Humanized C3 light chain variable framework region 1 (FWR1) acid sequence

SEQ ID NO: 489 - protein, 23 aa, Artificial Sequence
  Humanized C3 light chain variable framework region 1 (FWR1) acid sequence
DIVMTQTPLSLSVTPGQPASISC

SEQ ID NO: 490 - DNA, 47 bp, Artificial Sequence
  Humanized C3 light chain variable complementarity determining regions 1 (CDR1) sequence
ggtctagtcagaccattgtccatagtaatggaaacacctatttggag

SEQ ID NO: 491 - protein, 16 aa, Artificial Sequence
  Humanized C3 light chain variable complementarity determining regions 1 (CDR1) sequence
RSSQTIVHSNGNTYLE

SEQ ID NO: 492 - DNA, 45 bp, Artificial Sequence; identical to SEQ ID NO: 478
  Humanized C3 light chain variable framework region 2 (FWR2) acid sequence

SEQ ID NO: 493 - protein, 15 aa, Artificial Sequence
  Humanized C3 light chain variable framework region 2 (FWR2) acid sequence
WYLQKPGQSPQLLIY

SEQ ID NO: 494 - DNA, 21 bp, Artificial Sequence
  Humanized C3 light chain variable complementarity determining regions 2 (CDR2) sequence
aaggtttccaaccggttctct

SEQ ID NO: 495 - protein, 7 aa, Artificial Sequence
  Humanized C3 light chain variable complementarity determining regions 2 (CDR2) sequence
KVSNRFS

SEQ ID NO: 496 - DNA, 96 bp, Artificial Sequence; identical to SEQ ID NO: 482
  Humanized C3 light chain variable framework region 3 (FWR3) acid sequence

SEQ ID NO: 497 - protein, 32 aa, Artificial Sequence; identical to SEQ ID NO: 483
  Humanized C3 light chain variable framework region 3 (FWR3) acid sequence

SEQ ID NO: 498 - DNA, 27 bp, Artificial Sequence
  Humanized C3 light chain variable complementarity determining regions 3 (CDR3) sequence
ttccaaggtagccacgtgcctttcacc

SEQ ID NO: 499 - protein, 9 aa, Artificial Sequence
  Humanized C3 light chain variable complementarity determining regions 3 (CDR3) sequence
FQGSHVPFT

SEQ ID NO: 500 - DNA, 666 bp, Artificial Sequence
  Humanized C3 lambda light chain  sequence
gatattgtgatgacccagactccactctctctgtccgtcacccctggacagccggcctccatctcctgcaggtctagtcagaccattgtccatagtaatggaaacacctatttggagtggtacctgcagaagccaggccagtctccacagctcctgatctataaggtttccaaccggttctctggagtgccagataggttcagtggcagcgggtcagggacagatttcacactgaaaatcagccgggtggaggctgaggatgttggggtttattactgcttccaaggtagccacgtgcctttcaccttcggcggagggaccaaggtggagatcaaacgaactggtcagcccaaggctgccccctcggtcactctgttcccgccctcctctgaggagcttcaagccaacaaggccacactggtgtgtctcataagtgacttctacccgggagccgtgacagtggcctggaaggcagatagcagccccgtcaaggcgggagtggagaccaccacaccctccaaacaaagcaacaacaagtacgcggccagcagctatctgagcctgacgcctgagcagtggaagtcccacagaagctacagctgccaggtcacgcatgaagggagcaccgtggagaagacagtggcccctacagaatgttcatagtaa

SEQ ID NO: 501 - protein, 220 aa, Artificial Sequence
  Humanized C3 lambda light chain  sequence
DIVMTQTPLSLSVTPGQPASISCRSSQTIVHSNGNTYLEWYLQKPGQSPQLLIYKVSNRFSGVPDRFSGSGSGTDFTLKISRVEAEDVGVYYCFQGSHVPFTFGGGTKVEIKRTGQPKAAPSVTLFPPSSEELQANKATLVCLISDFYPGAVTVAWKADSSPVKAGVETTTPSKQSNNKYAASSYLSLTPEQWKSHRSYSCQVTHEGSTVEKTVAPTECS

SEQ ID NO: 502 - DNA, 666 bp, Artificial Sequence
  Humanized C3 Kappa light chain
gatattgtgatgacccagactccactctctctgtccgtcacccctggacagccggcctccatctcctgcaggtctagtcagaccattgtccatagtaatggaaacacctatttggagtggtacctgcagaagccaggccagtctccacagctcctgatctataaggtttccaaccggttctctggagtgccagataggttcagtggcagcgggtcagggacagatttcacactgaaaatcagccgggtggaggctgaggatgttggggtttattactgcttccaaggtagccacgtgcctttcaccttcggcggagggaccaaggtggagatcaaacgaactacggtggctgcaccatctgtcttcatcttcccgccatctgatgagcagttgaaatctggaactgcctctgttgtgtgcctgctgaataacttctatcccagagaggccaaagtacagtggaaggtggataacgccctccaatcgggtaactcccaggagagtgtcacagagcaggacagcaaggacagcacctacagcctcagcagcaccctgacgctgagcaaagcagactacgagaaacacaaagtctacgcctgcgaagtcacccatcagggcctgagctcgcccgtcacaaagagcttcaacaggggagagtgttagtaa

SEQ ID NO: 503 - protein, 220 aa, Artificial Sequence
  Humanized C3 Kappa light chain
DIVMTQTPLSLSVTPGQPASISCRSSQTIVHSNGNTYLEWYLQKPGQSPQLLIYKVSNRFSGVPDRFSGSGSGTDFTLKISRVEAEDVGVYYCFQGSHVPFTFGGGTKVEIKRTTVAAPSVFIFPPSDEQLKSGTASVVCLLNNFYPREAKVQWKVDNALQSGNSQESVTEQDSKDSTYSLSSTLTLSKADYEKHKVYACEVTHQGLSSPVTKSFNRGEC

SEQ ID NO: 504 - DNA, 815 bp, Artificial Sequence
  Humanized C3 Kappa light gBLOCK sequence
agctggctaggtaagcttggtaccgagctcggatccacgccaccatggagacagacacactcctgctatgggtactgctgctctgggttccaggttccactggtgacgatattgtgatgacccagactccactctctctgtccgtcacccctggacagccggcctccatctcctgcaggtctagtcagaccattgtccatagtaatggaaacacctatttggagtggtacctgcagaagccaggccagtctccacagctcctgatctataaggtttccaaccggttctctggagtgccagataggttcagtggcagcgggtcagggacagatttcacactgaaaatcagccgggtggaggctgaggatgttggggtttattactgcttccaaggtagccacgtgcctttcaccttcggcggagggaccaaggtggagatcaaacgaactacggtggctgcaccatctgtcttcatcttcccgccatctgatgagcagttgaaatctggaactgcctctgttgtgtgcctgctgaataacttctatcccagagaggccaaagtacagtggaaggtggataacgccctccaatcgggtaactcccaggagagtgtcacagagcaggacagcaaggacagcacctacagcctcagcagcaccctgacgctgagcaaagcagactacgagaaacacaaagtctacgcctgcgaagtcacccatcagggcctgagctcgcccgtcacaaagagcttcaacaggggagagtgttagtaagtttaaacccgctgatcagcctcgactgtgccttctagttgc

SEQ ID NO: 505 - DNA, 321 bp, Artificial Sequence
  Mouse C8 heavy chain variable region sequence
gaagtgatggtcgtggaaagcggcggtggtctggtaaagccggggggatcccttaagctttcttgcgccgcatccgggttcacgttctccggctatgccatgtcctgggtccgacagactcccgaaaagcgcttggaatgggtggccactatctcctccggggggacgtacatctactaccccgacagtgtgaaaggaagatttacaatatctcgcgacaacgcaaaaaataccttgtatcttcaaatgagctccctgcggtcagaggacactgccatgtactattgcgcccgcctgggcggcgacaattactatgagtat

SEQ ID NO: 506 - protein, 107 aa, Artificial Sequence
  Mouse C8 heavy chain variable region sequence
EVMVVESGGGLVKPGGSLKLSCAASGFTFSGYAMSWVRQTPEKRLEWVATISSGGTYIYYPDSVKGRFTISRDNAKNTLYLQMSSLRSEDTAMYYCARLGGDNYYEY

SEQ ID NO: 507 - DNA, 15 bp, Artificial Sequence
  Mouse C8 heavy chain variable complementarity determining region 1 (CDR1) sequence
ggctatgccatgtcc

SEQ ID NO: 508 - protein, 5 aa, Artificial Sequence
  Mouse C8 heavy chain variable complementarity determining region 1 (CDR1) sequence
GYAMS

SEQ ID NO: 509 - DNA, 51 bp, Artificial Sequence
  Mouse C8 heavy chain variable complementarity determining region 2 (CDR2) sequence
actatctcctccggggggacgtacatctactaccccgacagtgtgaaagga

SEQ ID NO: 510 - protein, 17 aa, Artificial Sequence
  Mouse C8 heavy chain variable complementarity determining region 2 (CDR2) sequence
TISSGGTYIYYPDSVKG

SEQ ID NO: 511 - DNA, 27 bp, Artificial Sequence
  Mouse C8 heavy chain variable complementarity determining region 3 (CDR3) sequence
ctgggcggcgacaattactatgagtat

SEQ ID NO: 512 - protein, 9 aa, Artificial Sequence
  Mouse C8 heavy chain variable complementarity determining region 3 (CDR3) sequence
LGGDNYYEY

SEQ ID NO: 513 - DNA, 292 bp, Artificial Sequence
  IGHV3-21*04 heavy chain variable region sequence
gaggtgcagctggtggagtctgggggaggcctggtcaagcctggggggtccctgagactctcctgtgcagcctctggattcaccttcagtagctatagcatgaactgggtccgccaggctccagggaaggggctggagtgggtctcatccattagtagtagtagtagttacatatactacgcagactcagtgaagggccgattcaccatctccagagacaacgccaagaactcactgtatctgcaaatgaacagcctgagagccgaggacacggccgtgtattactgtgcga

SEQ ID NO: 514 - protein, 98 aa, Artificial Sequence; identical to SEQ ID NO: 27
  IGHV3-21*04 heavy chain variable region sequence

SEQ ID NO: 515 - DNA, 90 bp, Artificial Sequence; identical to SEQ ID NO: 28
  IGHV3-21*04 heavy chain variable framework region 1 (FWR1) sequence

SEQ ID NO: 516 - protein, 30 aa, Artificial Sequence; identical to SEQ ID NO: 29
  IGHV3-21*04 heavy chain variable framework region 1 (FWR1) sequence

SEQ ID NO: 517 - DNA, 15 bp, Artificial Sequence
  IGHV3-21*04 heavy chain variable complementarity determining regions 1 (CDR1) sequence
agctatagcatgaac

SEQ ID NO: 518 - protein, 5 aa, Artificial Sequence
  IGHV3-21*04 heavy chain variable complementarity determining regions 1 (CDR1) sequence
SYSMN

SEQ ID NO: 519 - DNA, 39 bp, Artificial Sequence
  IGHV3-21*04 heavy chain variable framework region 2 (FWR2) sequence
tgggtccgccaggctccagggaaggggctggagtgggtc

SEQ ID NO: 520 - protein, 13 aa, Artificial Sequence
  IGHV3-21*04 heavy chain variable framework region 2 (FWR2) sequence
WVRQAPGKGLEWV

SEQ ID NO: 521 - DNA, 54 bp, Artificial Sequence
  IGHV3-21*04 heavy chain variable complementarity determining regions 2 (CDR2) sequence
tcatccattagtagtagtagtagttacatatactacgcagactcagtgaagggc

SEQ ID NO: 522 - protein, 18 aa, Artificial Sequence
  IGHV3-21*04 heavy chain variable complementarity determining regions 2 (CDR2) sequence
SSISSSSSYIYYADSVKG

SEQ ID NO: 523 - DNA, 94 bp, Artificial Sequence
  IGHV3-21*04 heavy chain variable framework region 3 (FWR3) sequence
cgattcaccatctccagagacaacgccaagaactcactgtatctgcaaatgaacagcctgagagccgaggacacggccgtgtattactgtgcga

SEQ ID NO: 524 - protein, 32 aa, Artificial Sequence; identical to SEQ ID NO: 37
  IGHV3-21*04 heavy chain variable framework region 3 (FWR3) sequence

SEQ ID NO: 525 - DNA, 354 bp, Artificial Sequence
  Humanized C8 heavy chain variable region sequence
gaggtgcagctggtggagtctgggggaggcctggtcaagcctggggggtccctgagactctcctgtgcagcctctggattcaccttcagtggctatgccatgagctgggtccgccaggctccagggaaggggctggagtgggtctcaaccattagtagtggcggaacctacatatactaccctgactcagtgaagggccgattcaccatctccagagacaacgccaagaactcactgtatctgcaaatgaacagcctgagagccgaggacacggccgtgtattactgtgcgagactgggcggcgataactattatgaatattggggcaaagggaccacggtcaccgtctcctcc

SEQ ID NO: 526 - protein, 118 aa, Artificial Sequence
  Humanized C8 heavy chain variable region sequence
EVQLVESGGGLVKPGGSLRLSCAASGFTFSGYAMSWVRQAPGKGLEWVSTISSGGTYIYYPDSVKGRFTISRDNAKNSLYLQMNSLRAEDTAVYYCARLGGDNYYEYWGKGTTVTVSS

SEQ ID NO: 527 - DNA, 90 bp, Artificial Sequence; identical to SEQ ID NO: 28
  Humanized C8 heavy chain variable framework region 1 (FWR1) sequence

SEQ ID NO: 528 - protein, 30 aa, Artificial Sequence; identical to SEQ ID NO: 29
  Humanized C8 heavy chain variable framework region 1 (FWR1) sequence

SEQ ID NO: 529 - DNA, 15 bp, Artificial Sequence
  Humanized C8 heavy chain variable complementarity determining region 1 (CDR1) sequence
ggctatgccatgagc

SEQ ID NO: 530 - protein, 5 aa, Artificial Sequence
  Humanized C8 heavy chain variable complementarity determining region 1 (CDR1) sequence
GYAMS

SEQ ID NO: 531 - DNA, 42 bp, Artificial Sequence; identical to SEQ ID NO: 32
  Humanized C8 heavy chain variable framework region 2 (FWR2) sequence

SEQ ID NO: 532 - protein, 14 aa, Artificial Sequence
  Humanized C8 heavy chain variable framework region 2 (FWR2) sequence
WVRQAPGKGLEWVS

SEQ ID NO: 533 - DNA, 51 bp, Artificial Sequence
  Humanized C8 heavy chain variable complementarity determining region 2 (CDR2) sequence
accattagtagtggcggaacctacatatactaccctgactcagtgaagggc

SEQ ID NO: 534 - protein, 17 aa, Artificial Sequence
  Humanized C8 heavy chain variable complementarity determining region 2 (CDR2) sequence
TISSGGTYIYYPDSVKG

SEQ ID NO: 535 - DNA, 96 bp, Artificial Sequence; identical to SEQ ID NO: 142
  Humanized C8 heavy chain variable framework region 3 (FWR3) sequence

SEQ ID NO: 536 - protein, 32 aa, Artificial Sequence; identical to SEQ ID NO: 37
  Humanized C8 heavy chain variable framework region 3 (FWR3) sequence

SEQ ID NO: 537 - DNA, 27 bp, Artificial Sequence
  Humanized C8 heavy chain variable complementarity determining region 3 (CDR3) sequence
ctgggcggcgataactattatgaatat

SEQ ID NO: 538 - protein, 9 aa, Artificial Sequence
  Humanized C8 heavy chain variable complementarity determining region 3 (CDR3) sequence
LGGDNYYEY

SEQ ID NO: 539 - DNA, 1350 bp, Artificial Sequence
  Humanized C8 IgG1 heavy chain sequence
gaggtgcagctggtggagtctgggggaggcctggtcaagcctggggggtccctgagactctcctgtgcagcctctggattcaccttcagtggctatgccatgagctgggtccgccaggctccagggaaggggctggagtgggtctcaaccattagtagtggcggaacctacatatactaccctgactcagtgaagggccgattcaccatctccagagacaacgccaagaactcactgtatctgcaaatgaacagcctgagagccgaggacacggccgtgtattactgtgcgagactgggcggcgataactattatgaatattggggcaaagggaccacggtcaccgtctcctccgctagcaccaagggcccatcggtcttccccctggcaccctcctccaagagcacctctgggggcacagcggccctgggctgcctggtcaaggactacttccccgaaccggtgacggtgtcgtggaactcaggcgccctgaccagcggcgtgcacaccttcccggctgtcctacagtcctcaggactctactccctcagcagcgtggtgacagtgccctccagcagcttgggcacccagacctacatctgcaacgtgaatcacaagcccagcaacaccaaggtggacaagaaagttgagcccaaatcttgtgacaaaactcacacatgcccaccgtgcccagcacctgaactcctggggggaccgtcagtcttcctcttccccccaaaacccaaggacaccctcatgatctcccggacccctgaggtcacatgcgtggtggtggacgtgagccacgaagaccctgaggtcaagttcaactggtacgtggacggcgtggaggtgcataatgccaagacaaagccgcgggaggagcagtacaacagcacgtaccgtgtggtcagcgtcctcaccgtcctgcaccaggactggctgaatggcaaggagtacaagtgcaaggtctccaacaaagccctcccagcccccatcgagaaaaccatctccaaagccaaagggcagccccgagaaccacaggtgtacaccctgcccccatcccgggaggagatgaccaagaaccaggtcagcctgacctgcctggtcaaaggcttctatcccagcgacatcgccgtggagtgggagagcaatgggcagccggagaacaactacaagaccacgcctcccgtgctggactccgacggctccttcttcctctacagcaagctcaccgtggacaagagcaggtggcagcaggggaacgtcttctcatgctccgtgatgcatgaggctctgcacaaccactacacgcagaagagcctctccctgtctccgggtaaatgataa

SEQ ID NO: 540 - protein, 448 aa, Artificial Sequence
  Humanized C8 IgG1 heavy chain sequence
EVQLVESGGGLVKPGGSLRLSCAASGFTFSGYAMSWVRQAPGKGLEWVSTISSGGTYIYYPDSVKGRFTISRDNAKNSLYLQMNSLRAEDTAVYYCARLGGDNYYEYWGKGTTVTVSSASTKGPSVFPLAPSSKSTSGGTAALGCLVKDYFPEPVTVSWNSGALTSGVHTFPAVLQSSGLYSLSSVVTVPSSSLGTQTYICNVNHKPSNTKVDKKVEPKSCDKTHTCPPCPAPELLGGPSVFLFPPKPKDTLMISRTPEVTCVVVDVSHEDPEVKFNWYVDGVEVHNAKTKPREEQYNSTYRVVSVLTVLHQDWLNGKEYKCKVSNKALPAPIEKTISKAKGQPREPQVYTLPPSREEMTKNQVSLTCLVKGFYPSDIAVEWESNGQPENNYKTTPPVLDSDGSFFLYSKLTVDKSRWQQGNVFSCSVMHEALHNHYTQKSLSLSPGK

SEQ ID NO: 541 - DNA, 1338 bp, Artificial Sequence
  Humanized C8 IgG2 heavy chain sequence
gaggtgcagctggtggagtctgggggaggcctggtcaagcctggggggtccctgagactctcctgtgcagcctctggattcaccttcagtggctatgccatgagctgggtccgccaggctccagggaaggggctggagtgggtctcaaccattagtagtggcggaacctacatatactaccctgactcagtgaagggccgattcaccatctccagagacaacgccaagaactcactgtatctgcaaatgaacagcctgagagccgaggacacggccgtgtattactgtgcgagactgggcggcgataactattatgaatattggggcaaagggaccacggtcaccgtctcctccgcctccaccaagggcccatcggtcttccccctggcgccctgctccaggagcacctccgagagcacagccgccctgggctgcctggtcaaggactacttccccgaaccggtgacggtgtcgtggaactcaggcgctctgaccagcggcgtgcacaccttcccagctgtcctacagtcctcaggactctactccctcagcagcgtggtgaccgtgccctccagcaacttcggcacccagacctacacctgcaacgtagatcacaagcccagcaacaccaaggtggacaagacagttgagcgcaaatgttgtgtcgagtgcccaccgtgcccagcaccacctgtggcaggaccgtcagtcttcctcttccccccaaaacccaaggacaccctcatgatctcccggacccctgaggtcacgtgcgtggtggtggacgtgagccacgaagaccccgaggtccagttcaactggtacgtggacggcgtggaggtgcataatgccaagacaaagccacgggaggagcagttcaacagcacgttccgtgtggtcagcgtcctcaccgttgtgcaccaggactggctgaacggcaaggagtacaagtgcaaggtctccaacaaaggcctcccagcccccatcgagaaaaccatctccaaaaccaaagggcagccccgagaaccacaggtgtacaccctgcccccatcccgggaggagatgaccaagaaccaggtcagcctgacctgcctggtcaaaggcttctaccccagcgacatcgccgtggagtgggagagcaatgggcagccggagaacaactacaagaccacacctcccatgctggactccgacggctccttcttcctctacagcaagctcaccgtggacaagagcaggtggcagcaggggaacgtcttctcatgctccgtgatgcatgaggctctgcacaaccactacacgcagaagagcctctccctgtctccgggtaaatagtaa

SEQ ID NO: 542 - protein, 444 aa, Artificial Sequence
  Humanized C8 IgG2 heavy chain sequence
EVQLVESGGGLVKPGGSLRLSCAASGFTFSGYAMSWVRQAPGKGLEWVSTISSGGTYIYYPDSVKGRFTISRDNAKNSLYLQMNSLRAEDTAVYYCARLGGDNYYEYWGKGTTVTVSSASTKGPSVFPLAPCSRSTSESTAALGCLVKDYFPEPVTVSWNSGALTSGVHTFPAVLQSSGLYSLSSVVTVPSSNFGTQTYTCNVDHKPSNTKVDKTVERKCCVECPPCPAPPVAGPSVFLFPPKPKDTLMISRTPEVTCVVVDVSHEDPEVQFNWYVDGVEVHNAKTKPREEQFNSTFRVVSVLTVVHQDWLNGKEYKCKVSNKGLPAPIEKTISKTKGQPREPQVYTLPPSREEMTKNQVSLTCLVKGFYPSDIAVEWESNGQPENNYKTTPPMLDSDGSFFLYSKLTVDKSRWQQGNVFSCSVMHEALHNHYTQKSLSLSPGK

SEQ ID NO: 543 - DNA, 306 bp, Artificial Sequence
  Mouse C8 light chain variable region sequence
gacatcgtcattacgcagacccctgccagtcttgccgtttctctgggccagagggccactatcagttacagggcgagtaagtctgtgagtaccagcggctatagttacatgcattggaaccagcagaaaccgggacagccaccacgcctgcttatttatctggtgtctaatcttgagtccggggtgcccgccaggttcagcggcagcggctctgggaccgacttcacactcaacattcatccagtggaagaagaggacgctgctacatactactgtcaacacattcgggaactgaccaggagtgaa

SEQ ID NO: 544 - protein, 102 aa, Artificial Sequence
  Mouse C8 light chain variable region sequence
DIVITQTPASLAVSLGQRATISYRASKSVSTSGYSYMHWNQQKPGQPPRLLIYLVSNLESGVPARFSGSGSGTDFTLNIHPVEEEDAATYYCQHIRELTRSE

SEQ ID NO: 545 - DNA, 45 bp, Artificial Sequence
  Mouse C8 light chain variable complementarity determining region 1 (CDR1) sequence
agggcgagtaagtctgtgagtaccagcggctatagttacatgcat

SEQ ID NO: 546 - protein, 15 aa, Artificial Sequence
  Mouse C8 light chain variable complementarity determining region 1 (CDR1) sequence
RASKSVSTSGYSYMH

SEQ ID NO: 547 - DNA, 21 bp, Artificial Sequence
  Mouse C8 light chain variable complementarity determining region 2 (CDR2) sequence
ctggtgtctaatcttgagtcc

SEQ ID NO: 548 - protein, 7 aa, Artificial Sequence
  Mouse C8 light chain variable complementarity determining region 2 (CDR2) sequence
LVSNLES

SEQ ID NO: 549 - DNA, 30 bp, Artificial Sequence
  Mouse C8 light chain variable complementarity determining region 3 (CDR3) sequence
caacacattcgggaactgaccaggagtgaa

SEQ ID NO: 550 - protein, 10 aa, Artificial Sequence
  Mouse C8 light chain variable complementarity determining region 3 (CDR3) sequence
QHIRELTRSE

SEQ ID NO: 551 - DNA, 303 bp, Artificial Sequence
  NCBI germline z00023 light chain variable region sequence
gacatcgtgatgacccagtctccagactccctggctgtgtctctgggcgagagggccaccatcaactgcaagtccagccagagtgttttatacagctccaacaataagaactacttagcttggtaccagcagaaaccaggacagcctcctaagctgctcatttactgggcatctacccgggaatccggggtccctgaccgattcagtggcagcgggtctgggacagatttcactctcaccatcagcagcctgcaggctgaagatgtggcagtttattactgtcagcaatattatagtactcct

SEQ ID NO: 552 - protein, 101 aa, Artificial Sequence
  NCBI germline z00023 light chain variable region sequence
DIVMTQSPDSLAVSLGERATINCKSSQSVLYSSNNKNYLAWYQQKPGQPPKLLIYWASTRESGVPDRFSGSGSGTDFTLTISSLQAEDVAVYYCQQYYSTP

SEQ ID NO: 553 - DNA, 69 bp, Artificial Sequence
  NCBI germline z00023 light chain variable framework region 1 (FWR1) acid sequence
gacatcgtgatgacccagtctccagactccctggctgtgtctctgggcgagagggccaccatcaactgc

SEQ ID NO: 554 - protein, 23 aa, Artificial Sequence
  NCBI germline z00023 light chain variable framework region 1 (FWR1) acid sequence
DIVMTQSPDSLAVSLGERATINC

SEQ ID NO: 555 - DNA, 51 bp, Artificial Sequence
  NCBI germline z00023 light chain variable complementarity determining regions 1 (CDR1) sequence
aagtccagccagagtgttttatacagctccaacaataagaactacttagct

SEQ ID NO: 556 - protein, 17 aa, Artificial Sequence
  NCBI germline z00023 light chain variable complementarity determining regions 1 (CDR1) sequence
KSSQSVLYSSNNKNYLA

SEQ ID NO: 557 - DNA, 45 bp, Artificial Sequence
  NCBI germline z00023 light chain variable framework region 2 (FWR2) sequence
tggtaccagcagaaaccaggacagcctcctaagctgctcatttac

SEQ ID NO: 558 - protein, 15 aa, Artificial Sequence
  NCBI germline z00023 light chain variable framework region 2 (FWR2) sequence
WYQQKPGQPPKLLIY

SEQ ID NO: 559 - DNA, 21 bp, Artificial Sequence
  NCBI germline z00023 light chain variable complementarity determining regions 2 (CDR2) sequence
tgggcatctacccgggaatcc

SEQ ID NO: 560 - protein, 7 aa, Artificial Sequence
  NCBI germline z00023 light chain variable complementarity determining regions 2 (CDR2) sequence
WASTRES

SEQ ID NO: 561 - DNA, 96 bp, Artificial Sequence
  NCBI germline z00023 light chain variable framework region 3 (FWR3) sequence
ggggtccctgaccgattcagtggcagcgggtctgggacagatttcactctcaccatcagcagcctgcaggctgaagatgtggcagtttattactgt

SEQ ID NO: 562 - protein, 32 aa, Artificial Sequence
  NCBI germline z00023 light chain variable framework region 3 (FWR3) sequence
GVPDRFSGSGSGTDFTLTISSLQAEDVAVYYC

SEQ ID NO: 563 - DNA, 21 bp, Artificial Sequence
  NCBI germline z00023 light chain variable complementarity determining regions3 (CDR3) sequence
cagcaatattatagtactcct

SEQ ID NO: 564 - protein, 7 aa, Artificial Sequence
  NCBI germline z00023 light chain variable complementarity determining regions3 (CDR3) sequence
QQYYSTP

SEQ ID NO: 565 - DNA, 342 bp, Artificial Sequence
  Humanized C8 light chain variable region sequence
gacatcgtgatgacccagtctccagactccctggctgtgtctctgggcgagagggccaccatcaactgcagggccagcaagagtgttagcaccagcggctacagctacatgcactggtaccagcagaaaccaggacagcctcctaagctgctcatttacctggtgtctaacctggaatccggggtccctgaccgattcagtggcagcgggtctgggacagatttcactctcaccatcagcagcctgcaggctgaagatgtggcagtttattactgtcaacacattcgggaactgaccaggagtgaattcggcggagggaccaaggtggagatcaaacgaact

SEQ ID NO: 566 - protein, 114 aa, Artificial Sequence
  Humanized C8 light chain variable region sequence
DIVMTQSPDSLAVSLGERATINCRASKSVSTSGYSYMHWYQQKPGQPPKLLIYLVSNLESGVPDRFSGSGSGTDFTLTISSLQAEDVAVYYCQHIRELTRSEFGGGTKVEIKRT

SEQ ID NO: 567 - DNA, 69 bp, Artificial Sequence; identical to SEQ ID NO: 553
  Humanized C8 light chain variable framework region 1 (FWR1) sequence

SEQ ID NO: 568 - protein, 23 aa, Artificial Sequence
  Humanized C8 light chain variable framework region 1 (FWR1) sequence
DIVMTQSPDSLAVSLGERATINC

SEQ ID NO: 569 - DNA, 42 bp, Artificial Sequence
  Humanized C8 light chain variable complementarity determining region 1 (CDR1) sequence
agggccagcaagagtgttagcaccagcggctacagctacatg

SEQ ID NO: 570 - protein, 14 aa, Artificial Sequence
  Humanized C8 light chain variable complementarity determining region 1 (CDR1) sequence
RASKSVSTSGYSYM

SEQ ID NO: 571 - DNA, 48 bp, Artificial Sequence
  Humanized C8 light chain variable framework region 2 (FWR2) sequence
cactggtaccagcagaaaccaggacagcctcctaagctgctcatttac

SEQ ID NO: 572 - protein, 16 aa, Artificial Sequence
  Humanized C8 light chain variable framework region 2 (FWR2) sequence
HWYQQKPGQPPKLLIY

SEQ ID NO: 573 - DNA, 21 bp, Artificial Sequence
  Humanized C8 light chain variable complementarity determining region 2 (CDR2) sequence
ctggtgtctaacctggaatcc

SEQ ID NO: 574 - protein, 7 aa, Artificial Sequence
  Humanized C8 light chain variable complementarity determining region 2 (CDR2) sequence
LVSNLES

SEQ ID NO: 575 - DNA, 96 bp, Artificial Sequence; identical to SEQ ID NO: 561
  Humanized C8 light chain variable framework region 3 (FWR3) sequence

SEQ ID NO: 576 - protein, 32 aa, Artificial Sequence; identical to SEQ ID NO: 562
  Humanized C8 light chain variable framework region 3 (FWR3) sequence

SEQ ID NO: 577 - DNA, 30 bp, Artificial Sequence; identical to SEQ ID NO: 549
  Humanized C8 light chain variable complementarity determining region 3 (CDR3) sequence

SEQ ID NO: 578 - protein, 10 aa, Artificial Sequence
  Humanized C8 light chain variable complementarity determining region 3 (CDR3) sequence
QHIRELTRSE

SEQ ID NO: 579 - DNA, 666 bp, Artificial Sequence
  Humanized C8 Lambda light chain sequence
gacatcgtgatgacccagtctccagactccctggctgtgtctctgggcgagagggccaccatcaactgcagggccagcaagagtgttagcaccagcggctacagctacatgcactggtaccagcagaaaccaggacagcctcctaagctgctcatttacctggtgtctaacctggaatccggggtccctgaccgattcagtggcagcgggtctgggacagatttcactctcaccatcagcagcctgcaggctgaagatgtggcagtttattactgtcaacacattcgggaactgaccaggagtgaattcggcggagggaccaaggtggagatcaaacgaactggtcagcccaaggctgccccctcggtcactctgttcccgccctcctctgaggagcttcaagccaacaaggccacactggtgtgtctcataagtgacttctacccgggagccgtgacagtggcctggaaggcagatagcagccccgtcaaggcgggagtggagaccaccacaccctccaaacaaagcaacaacaagtacgcggccagcagctatctgagcctgacgcctgagcagtggaagtcccacagaagctacagctgccaggtcacgcatgaagggagcaccgtggagaagacagtggcccctacagaatgttcatagtaa

SEQ ID NO: 580 - protein, 220 aa, Artificial Sequence
  Humanized C8 Lambda light chain sequence
DIVMTQSPDSLAVSLGERATINCRASKSVSTSGYSYMHWYQQKPGQPPKLLIYLVSNLESGVPDRFSGSGSGTDFTLTISSLQAEDVAVYYCQHIRELTRSEFGGGTKVEIKRTGQPKAAPSVTLFPPSSEELQANKATLVCLISDFYPGAVTVAWKADSSPVKAGVETTTPSKQSNNKYAASSYLSLTPEQWKSHRSYSCQVTHEGSTVEKTVAPTECS

SEQ ID NO: 581 - DNA, 666 bp, Artificial Sequence
  Humanized C8 Kappa light chain sequence
gacatcgtgatgacccagtctccagactccctggctgtgtctctgggcgagagggccaccatcaactgcagggccagcaagagtgttagcaccagcggctacagctacatgcactggtaccagcagaaaccaggacagcctcctaagctgctcatttacctggtgtctaacctggaatccggggtccctgaccgattcagtggcagcgggtctgggacagatttcactctcaccatcagcagcctgcaggctgaagatgtggcagtttattactgtcaacacattcgggaactgaccaggagtgaattcggcggagggaccaaggtggagatcaaacgaactacggtggctgcaccatctgtcttcatcttcccgccatctgatgagcagttgaaatctggaactgcctctgttgtgtgcctgctgaataacttctatcccagagaggccaaagtacagtggaaggtggataacgccctccaatcgggtaactcccaggagagtgtcacagagcaggacagcaaggacagcacctacagcctcagcagcaccctgacgctgagcaaagcagactacgagaaacacaaagtctacgcctgcgaagtcacccatcagggcctgagctcgcccgtcacaaagagcttcaacaggggagagtgttagtaa

SEQ ID NO: 582 - protein, 220 aa, Artificial Sequence
  Humanized C8 Kappa light chain sequence
DIVMTQSPDSLAVSLGERATINCRASKSVSTSGYSYMHWYQQKPGQPPKLLIYLVSNLESGVPDRFSGSGSGTDFTLTISSLQAEDVAVYYCQHIRELTRSEFGGGTKVEIKRTTVAAPSVFIFPPSDEQLKSGTASVVCLLNNFYPREAKVQWKVDNALQSGNSQESVTEQDSKDSTYSLSSTLTLSKADYEKHKVYACEVTHQGLSSPVTKSFNRGEC

SEQ ID NO: 583 - DNA, 815 bp, Artificial Sequence
  Humanized C8 Kappa light chain gBLOCk sequence
agctggctaggtaagcttggtaccgagctcggatccacgccaccatggagacagacacactcctgctatgggtactgctgctctgggttccaggttccactggtgacgacatcgtgatgacccagtctccagactccctggctgtgtctctgggcgagagggccaccatcaactgcagggccagcaagagtgttagcaccagcggctacagctacatgcactggtaccagcagaaaccaggacagcctcctaagctgctcatttacctggtgtctaacctggaatccggggtccctgaccgattcagtggcagcgggtctgggacagatttcactctcaccatcagcagcctgcaggctgaagatgtggcagtttattactgtcaacacattcgggaactgaccaggagtgaattcggcggagggaccaaggtggagatcaaacgaactacggtggctgcaccatctgtcttcatcttcccgccatctgatgagcagttgaaatctggaactgcctctgttgtgtgcctgctgaataacttctatcccagagaggccaaagtacagtggaaggtggataacgccctccaatcgggtaactcccaggagagtgtcacagagcaggacagcaaggacagcacctacagcctcagcagcaccctgacgctgagcaaagcagactacgagaaacacaaagtctacgcctgcgaagtcacccatcagggcctgagctcgcccgtcacaaagagcttcaacaggggagagtgttagtaagtttaaacccgctgatcagcctcgactgtgccttctagttgc

SEQ ID NO: 584 - DNA, 942 bp, Artificial Sequence
  CAR-T E6 CD8 sequence
gaggtccagctggttgagagtggcggtgggctggttaagcctggcggctccctgcggctgagctgcgccgcgagtggatttactttcagccgatatgggatgagttgggtgcggcaagctcccgggaagaggctggaatgggtctcaacaatctccggggggggcacttacatctattaccccgactcagtcaaggggagatttaccatttcacgagacaacgctaagaataccctgtatttgcagatgaattctctgagagcagaggacacagctgtttactattgtacccgcgacaactatggcaggaactacgactacggtatggactattggggacaagggacattggttacagtgagcagtggcggcgggggcagcggaggaggaggcagcggtggggggggcagcgagatagtgctcacgcagtcacccgcgactctcagtctctcacctggggaacgagctaccctgacgtgctctgctacctcctcagtgtcatatattcactggtatcagcaacggcccgggcagtcccctagattgctcatttatagtacctctaatctggcctcaggtatccctgcacgattttctggatctggttcaggttctgattacaccctcactatctctagcctggagcctgaagactttgccgtttattactgccagcagaggtctagctccccattcacctttgggagtgggaccaaggttgaaattaaaacgacaaccccggcccccagaccaccaacgccagcccccaccatcgccagccaacccctgtctctgagaccagaagcctgtaggcctgccgccggtggagctgtgcacacaagaggactggatttcgcctgtgatatctacatttgggccccgctcgcaggcacatgtggagtgctcctcctctccctggtgattaccctgtactgctgataa

SEQ ID NO: 585 - protein, 312 aa, Artificial Sequence
  CAR-T E6 CD8 sequence
EVQLVESGGGLVKPGGSLRLSCAASGFTFSRYGMSWVRQAPGKRLEWVSTISGGGTYIYYPDSVKGRFTISRDNAKNTLYLQMNSLRAEDTAVYYCTRDNYGRNYDYGMDYWGQGTLVTVSSGGGGSGGGGSGGGGSEIVLTQSPATLSLSPGERATLTCSATSSVSYIHWYQQRPGQSPRLLIYSTSNLASGIPARFSGSGSGSDYTLTISSLEPEDFAVYYCQQRSSSPFTFGSGTKVEIKTTTPAPRPPTPAPTIASQPLSLRPEACRPAAGGAVHTRGLDFACDIYIWAPLAGTCGVLLLSLVITLYC

SEQ ID NO: 586 - DNA, 960 bp, Artificial Sequence
  CAR-T C2 CD8 sequence
gaagtgcagctcgtagagagtggcgggggactggtgaagcccggtggaagcctcagactcagttgcgccgcctcaggtttcactttttcaggttacgccatgtcctgggtaagacaggcaccggggaaaggactcgagtgggtgtctactatcagctcaggaggcacttatatatattatcctgactctgtaaaaggccgatttacgatttctcgcgacaatgcaaagaactccctctacctccaaatgaacagtcttagggcagaagacactgctgtatactattgtgcacgcctcggcggcgacaactactacgagtactttgacgtgtgggggaaagggactaccgtgacagtttcaagcggaggaggtggctcaggtggaggcgggtcaggggggggaggaagtgatattgtgctcacacaatccccagcctccctggctgtgtctcccggccaacgcgctacaattacatgtcgggcctccaaaagcgtgagcaccagcggctacagctacatgcactggtatcaacagaaaccaggacaaccccccaaactgttgatttatctcgcttcaaacttggagtccggcgtgcctgcgcgcttttcagggagtgggagcggcacagattttacgctgactatcaaccccgtagaagcaaacgatacagcgaattattattgtcaacattcccgggaactcccctttacgttcggcgggggcacaaaggtcgaaattaagagaaccacgacaaccccggcccccagaccaccaacgccagcccccaccatcgccagccaacccctgtctctgagaccagaagcctgtaggcctgccgccggtggagctgtgcacacaagaggactggatttcgcctgtgatatctacatttgggccccgctcgcaggcacatgtggagtgctcctcctctccctggtgattaccctgtactgctgataa

SEQ ID NO: 587 - protein, 318 aa, Artificial Sequence
  CAR-T C2 CD8 sequence
EVQLVESGGGLVKPGGSLRLSCAASGFTFSGYAMSWVRQAPGKGLEWVSTISSGGTYIYYPDSVKGRFTISRDNAKNSLYLQMNSLRAEDTAVYYCARLGGDNYYEYFDVWGKGTTVTVSSGGGGSGGGGSGGGGSDIVLTQSPASLAVSPGQRATITCRASKSVSTSGYSYMHWYQQKPGQPPKLLIYLASNLESGVPARFSGSGSGTDFTLTINPVEANDTANYYCQHSRELPFTFGGGTKVEIKRTTTTPAPRPPTPAPTIASQPLSLRPEACRPAAGGAVHTRGLDFACDIYIWAPLAGTCGVLLLSLVITLYC

SEQ ID NO: 588 - DNA, 339 bp, Artificial Sequence
  CD8/4-1BB sequence
acgacaaccccggcccccagaccaccaacgccagcccccaccatcgccagccaacccctgtctctgagaccagaagcctgtaggcctgccgccggtggagctgtgcacacaagaggactggatttcgcctgtgatatctacatttgggccccgctcgcaggcacatgtggagtgctcctcctctccctggtgattaccctgtactgcaaaaggggccgcaaaaaactcctttacatttttaagcagccttttatgaggccagtacagacgactcaagaggaagacgggtgctcatgccgctttcctgaggaggaggaaggagggtgcgaactgtgataa

SEQ ID NO: 589 - protein, 111 aa, Artificial Sequence
  CD8/4-1BB sequence
TTTPAPRPPTPAPTIASQPLSLRPEACRPAAGGAVHTRGLDFACDIYIWAPLAGTCGVLLLSLVITLYCKRGRKKLLYIFKQPFMRPVQTTQEEDGCSCRFPEEEEGGCEL

SEQ ID NO: 590 - DNA, 336 bp, Artificial Sequence
  CD8/CD28 sequence
acgacaaccccggcccccagaccaccaacgccagcccccaccatcgccagccaacccctgtctctgagaccagaagcctgtaggcctgccgccggtggagctgtgcacacaagaggactggatttcgcctgtgatatctacatttgggccccgctcgcaggcacatgtggagtgctcctcctctccctggtgattaccctgtactgcagaagcaagcggtctcggctcctgcattctgattacatgaacatgaccccaagaagaccaggccccaccaggaaacattaccagccctacgctccgccacgcgacttcgctgcctaccggtcctgataa

SEQ ID NO: 591 - protein, 110 aa, Artificial Sequence
  CD8/CD28 sequence
TTTPAPRPPTPAPTIASQPLSLRPEACRPAAGGAVHTRGLDFACDIYIWAPLAGTCGVLLLSLVITLYCRSKRSRLLHSDYMNMTPRRPGPTRKHYQPYAPPRDFAAYRS

SEQ ID NO: 592 - DNA, 549 bp, Artificial Sequence
  CD8/CD3z sequence
acgacaaccccggcccccagaccaccaacgccagcccccaccatcgccagccaacccctgtctctgagaccagaagcctgtaggcctgccgccggtggagctgtgcacacaagaggactggatttcgcctgtgatatctacatttgggccccgctcgcaggcacatgtggagtgctcctcctctccctggtgattaccctgtactgccgcgttaagttctcccgatcagccgacgcgcctgcttacaagcagggccagaaccaactgtacaacgagctgaatctcggtagacgggaagagtacgacgtgttggacaaacggagaggccgcgacccagaaatgggcggcaagcctcgcaggaaaaacccccaggagggactgtacaatgagttgcagaaagataagatggcagaagcttatagcgagatcggaatgaagggggaaaggagacgagggaaaggacacgacggcctttatcagggcctgtccacagcaacaaaagatacgtatgacgccctccatatgcaggcacttccaccacggtgataa

SEQ ID NO: 593 - protein, 181 aa, Artificial Sequence
  CD8/CD3z sequence
TTTPAPRPPTPAPTIASQPLSLRPEACRPAAGGAVHTRGLDFACDIYIWAPLAGTCGVLLLSLVITLYCRVKFSRSADAPAYKQGQNQLYNELNLGRREEYDVLDKRRGRDPEMGGKPRRKNPQEGLYNELQKDKMAEAYSEIGMKGERRRGKGHDGLYQGLSTATKDTYDALHMQALPPR

SEQ ID NO: 594 - DNA, 672 bp, Artificial Sequence
  CD8/CD28/CD3z sequence
acgacaaccccggcccccagaccaccaacgccagcccccaccatcgccagccaacccctgtctctgagaccagaagcctgtaggcctgccgccggtggagctgtgcacacaagaggactggatttcgcctgtgatatctacatttgggccccgctcgcaggcacatgtggagtgctcctcctctccctggtgattaccctgtactgcagaagcaagcggtctcggctcctgcattctgattacatgaacatgaccccaagaagaccaggccccaccaggaaacattaccagccctacgctccgccacgcgacttcgctgcctaccggtcccgcgttaagttctcccgatcagccgacgcgcctgcttacaagcagggccagaaccaactgtacaacgagctgaatctcggtagacgggaagagtacgacgtgttggacaaacggagaggccgcgacccagaaatgggcggcaagcctcgcaggaaaaacccccaggagggactgtacaatgagttgcagaaagataagatggcagaagcttatagcgagatcggaatgaagggggaaaggagacgagggaaaggacacgacggcctttatcagggcctgtccacagcaacaaaagatacgtatgacgccctccatatgcaggcacttccaccacggtgataa

SEQ ID NO: 595 - protein, 222 aa, Artificial Sequence
  CD8/CD28/CD3z sequence
TTTPAPRPPTPAPTIASQPLSLRPEACRPAAGGAVHTRGLDFACDIYIWAPLAGTCGVLLLSLVITLYCRSKRSRLLHSDYMNMTPRRPGPTRKHYQPYAPPRDFAAYRSRVKFSRSADAPAYKQGQNQLYNELNLGRREEYDVLDKRRGRDPEMGGKPRRKNPQEGLYNELQKDKMAEAYSEIGMKGERRRGKGHDGLYQGLSTATKDTYDALHMQALPPR

SEQ ID NO: 596 - DNA, 675 bp, Artificial Sequence
  CD8/4-1BB/CD3z sequence
acgacaaccccggcccccagaccaccaacgccagcccccaccatcgccagccaacccctgtctctgagaccagaagcctgtaggcctgccgccggtggagctgtgcacacaagaggactggatttcgcctgtgatatctacatttgggccccgctcgcaggcacatgtggagtgctcctcctctccctggtgattaccctgtactgcaaaaggggccgcaaaaaactcctttacatttttaagcagccttttatgaggccagtacagacgactcaagaggaagacgggtgctcatgccgctttcctgaggaggaggaaggagggtgcgaactgcgcgttaagttctcccgatcagccgacgcgcctgcttacaagcagggccagaaccaactgtacaacgagctgaatctcggtagacgggaagagtacgacgtgttggacaaacggagaggccgcgacccagaaatgggcggcaagcctcgcaggaaaaacccccaggagggactgtacaatgagttgcagaaagataagatggcagaagcttatagcgagatcggaatgaagggggaaaggagacgagggaaaggacacgacggcctttatcagggcctgtccacagcaacaaaagatacgtatgacgccctccatatgcaggcacttccaccacggtgataa

SEQ ID NO: 597 - protein, 223 aa, Artificial Sequence
  CD8/4-1BB/CD3z sequence
TTTPAPRPPTPAPTIASQPLSLRPEACRPAAGGAVHTRGLDFACDIYIWAPLAGTCGVLLLSLVITLYCKRGRKKLLYIFKQPFMRPVQTTQEEDGCSCRFPEEEEGGCELRVKFSRSADAPAYKQGQNQLYNELNLGRREEYDVLDKRRGRDPEMGGKPRRKNPQEGLYNELQKDKMAEAYSEIGMKGERRRGKGHDGLYQGLSTATKDTYDALHMQALPPR

SEQ ID NO: 598 - DNA, 798 bp, Artificial Sequence
  CD8/CD28/4-1BB/CD3z sequence
acgacaaccccggcccccagaccaccaacgccagcccccaccatcgccagccaacccctgtctctgagaccagaagcctgtaggcctgccgccggtggagctgtgcacacaagaggactggatttcgcctgtgatatctacatttgggccccgctcgcaggcacatgtggagtgctcctcctctccctggtgattaccctgtactgcagaagcaagcggtctcggctcctgcattctgattacatgaacatgaccccaagaagaccaggccccaccaggaaacattaccagccctacgctccgccacgcgacttcgctgcctaccggtccaaaaggggccgcaaaaaactcctttacatttttaagcagccttttatgaggccagtacagacgactcaagaggaagacgggtgctcatgccgctttcctgaggaggaggaaggagggtgcgaactgcgcgttaagttctcccgatcagccgacgcgcctgcttacaagcagggccagaaccaactgtacaacgagctgaatctcggtagacgggaagagtacgacgtgttggacaaacggagaggccgcgacccagaaatgggcggcaagcctcgcaggaaaaacccccaggagggactgtacaatgagttgcagaaagataagatggcagaagcttatagcgagatcggaatgaagggggaaaggagacgagggaaaggacacgacggcctttatcagggcctgtccacagcaacaaaagatacgtatgacgccctccatatgcaggcacttccaccacggtgataa

SEQ ID NO: 599 - protein, 264 aa, Artificial Sequence
  CD8/CD28/4-1BB/CD3z sequence
TTTPAPRPPTPAPTIASQPLSLRPEACRPAAGGAVHTRGLDFACDIYIWAPLAGTCGVLLLSLVITLYCRSKRSRLLHSDYMNMTPRRPGPTRKHYQPYAPPRDFAAYRSKRGRKKLLYIFKQPFMRPVQTTQEEDGCSCRFPEEEEGGCELRVKFSRSADAPAYKQGQNQLYNELNLGRREEYDVLDKRRGRDPEMGGKPRRKNPQEGLYNELQKDKMAEAYSEIGMKGERRRGKGHDGLYQGLSTATKDTYDALHMQALPPR

SEQ ID NO: 600 - DNA, 1482 bp, Artificial Sequence
  CAR-T C3 4-1BB/CD3z sequence
atggccctgcccgtgaccgctttgctgctccccctggcgctgctgctgcacgccgccaggccacaggttcagctggtgcagtctggagctgaggtgaagaagcctggggcctcagtgaaggtctcctgcaaggcttctggttacacctttaccgactacgccatgaactgggtgcgacaggcccctggacaagggcttgagtggatgggagtgatcagcaccttcagcggtaacacaaacttcaaccagaagttcaagggcagagtcaccatgaccacagacacatccacgagcacagcctacatggagctgaggagcctgagatctgacgacacggccgtgtattactgtgcgagaagcgactactacggcccatacttcgactactggggccagggcaccaccctgaccgtgtccagcggcggtggcggatccggcggtggcggatccggcggtggcggatccgatattgtgatgacccagactccactctctctgtccgtcacccctggacagccggcctccatctcctgcaggtctagtcagaccattgtccatagtaatggaaacacctatttggagtggtacctgcagaagccaggccagtctccacagctcctgatctataaggtttccaaccggttctctggagtgccagataggttcagtggcagcgggtcagggacagatttcacactgaaaatcagccgggtggaggctgaggatgttggggtttattactgcttccaaggtagccacgtgcctttcaccttcggcggagggaccaaggtggagatcaaacgaactacgacaaccccggcccccagaccaccaacgccagcccccaccatcgccagccaacccctgtctctgagaccagaagcctgtaggcctgccgccggtggagctgtgcacacaagaggactggatttcgcctgtgatatctacatttgggccccgctcgcaggcacatgtggagtgctcctcctctccctggtgattaccctgtactgcaaaaggggccgcaaaaaactcctttacatttttaagcagccttttatgaggccagtacagacgactcaagaggaagacgggtgctcatgccgctttcctgaggaggaggaaggagggtgcgaactgcgcgttaagttctcccgatcagccgacgcgcctgcttacaagcagggccagaaccaactgtacaacgagctgaatctcggtagacgggaagagtacgacgtgttggacaaacggagaggccgcgacccagaaatgggcggcaagcctcgcaggaaaaacccccaggagggactgtacaatgagttgcagaaagataagatggcagaagcttatagcgagatcggaatgaagggggaaaggagacgagggaaaggacacgacggcctttatcagggcctgtccacagcaacaaaagatacgtatgacgccctccatatgcaggcacttccaccacggtgataa

SEQ ID NO: 601 - protein, 471 aa, Artificial Sequence
  CAR-T C3 4-1BB/CD3z sequence
QVQLVQSGAEVKKPGASVKVSCKASGYTFTDYAMNWVRQAPGQGLEWMGVISTFSGNTNFNQKFKGRVTMTTDTSTSTAYMELRSLRSDDTAVYYCARSDYYGPYFDYWGQGTTLTVSSGGGGSGGGGSGGGGSDIVMTQTPLSLSVTPGQPASISCRSSQTIVHSNGNTYLEWYLQKPGQSPQLLIYKVSNRFSGVPDRFSGSGSGTDFTLKISRVEAEDVGVYYCFQGSHVPFTFGGGTKVEIKRTTTTPAPRPPTPAPTIASQPLSLRPEACRPAAGGAVHTRGLDFACDIYIWAPLAGTCGVLLLSLVITLYCKRGRKKLLYIFKQPFMRPVQTTQEEDGCSCRFPEEEEGGCELRVKFSRSADAPAYKQGQNQLYNELNLGRREEYDVLDKRRGRDPEMGGKPRRKNPQEGLYNELQKDKMAEAYSEIGMKGERRRGKGHDGLYQGLSTATKDTYDALHMQALPPR

SEQ ID NO: 602 - DNA, 567 bp, Artificial Sequence
  C3 CAR gBLOCK 1 sequence
atccacgctgttttgacctccatagaagattctagagctagctgtagagcttggtaccgagggccaccatggccctgcccgtgaccgctttgctgctccccctggcgctgctgctgcacgccgccaggccacaggttcagctggtgcagtctggagctgaggtgaagaagcctggggcctcagtgaaggtctcctgcaaggcttctggttacacctttaccgactacgccatgaactgggtgcgacaggcccctggacaagggcttgagtggatgggagtgatcagcaccttcagcggtaacacaaacttcaaccagaagttcaagggcagagtcaccatgaccacagacacatccacgagcacagcctacatggagctgaggagcctgagatctgacgacacggccgtgtattactgtgcgagaagcgactactacggcccatacttcgactactggggccagggcaccaccctgaccgtgtccagcggcggtggcggatccggcggtggcggatccggcggtggcggatccgatattgtgatgacccagactccactctctctgt

SEQ ID NO: 603 - DNA, 509 bp, Artificial Sequence
  C3 CAR gBLOCK 2 sequence
tattgtgatgacccagactccactctctctgtccgtcacccctggacagccggcctccatctcctgcaggtctagtcagaccattgtccatagtaatggaaacacctatttggagtggtacctgcagaagccaggccagtctccacagctcctgatctataaggtttccaaccggttctctggagtgccagataggttcagtggcagcgggtcagggacagatttcacactgaaaatcagccgggtggaggctgaggatgttggggtttattactgcttccaaggtagccacgtgcctttcaccttcggcggagggaccaaggtggagatcaaacgaactacgacaaccccggcccccagaccaccaacgccagcccccaccatcgccagccaacccctgtctctgagaccagaagcctgtaggcctgccgccggtggagctgtgcacacaagaggactggatttcgcctgtgatatctacatttgggccccgctcgcaggcacatgtg

SEQ ID NO: 604 - DNA, 455 bp, Artificial Sequence
  E6 scFV gBLOCK 1 sequence
tgctctgggttccaggttccactggtgacgcggcccagccggccgaggtgcagctggtggagtctgggggaggcctggtcaagcctggggggtccctgagactctcctgtgcagcctctggattcaccttcagtaggtatggcatgagctgggtccgccaggctccagggaagaggctggagtgggtctcaaccattagtggcggaggcacctacatatactacccagactcagtgaagggccgattcaccatctccagagacaacgccaagaacaccctgtatctgcaaatgaacagcctgagagccgaggacacggctgtgtattactgtaccagagataactatggccgcaactatgattatggcatggattattggggccagggcaccctggtgaccgtgagcagcggcggtggcggatccggcggtggcggatccggcggtggcggatcc

SEQ ID NO: 605 - DNA, 432 bp, Artificial Sequence
  E6 scFV gBLOCK 2 sequence
ggcggtggcggatccggcggtggcggatccggcggtggcggatccgaaattgtgttgacacagtctccagccaccctgtctttgtctccaggggaaagagccaccctcacctgcagcgccaccagcagtgttagctacatccactggtaccaacagaggcctggccagagccccaggctcctcatctatagcacctccaacctggccagcggcatcccagccaggttcagtggcagtgggtctgggagcgactacactctcaccatcagcagcctagagcctgaagattttgcagtttattactgtcagcagcgtagcagctcccctttcacctttggcagcggcaccaaagtggaaattaaaaccggtcatcatcaccatcaccactgataagtttaaacccgctgatcagcctcgactgtgccttctagt

SEQ ID NO: 606 - DNA, 1359 bp, Artificial Sequence
  CAR-T C2 CD3z sequence
atggccttgccagtgacggccctgctgctgccattggctcttctgttgcacgctgccaggcctgaagtgcagctcgtagagagtggcgggggactggtgaagcccggtggaagcctcagactcagttgcgccgcctcaggtttcactttttcaggttacgccatgtcctgggtaagacaggcaccggggaaaggactcgagtgggtgtctactatcagctcaggaggcacttatatatattatcctgactctgtaaaaggccgatttacgatttctcgcgacaatgcaaagaactccctctacctccaaatgaacagtcttagggcagaagacactgctgtatactattgtgcacgcctcggcggcgacaactactacgagtactttgacgtgtgggggaaagggactaccgtgacagtttcaagcggaggaggtggctcaggtggaggcgggtcaggggggggaggaagtgatattgtgctcacacaatccccagcctccctggctgtgtctcccggccaacgcgctacaattacatgtcgggcctccaaaagcgtgagcaccagcggctacagctacatgcactggtatcaacagaaaccaggacaaccccccaaactgttgatttatctcgcttcaaacttggagtccggcgtgcctgcgcgcttttcagggagtgggagcggcacagattttacgctgactatcaaccccgtagaagcaaacgatacagcgaattattattgtcaacattcccgggaactcccctttacgttcggcgggggcacaaaggtcgaaattaagagaaccacgacaaccccggcccccagaccaccaacgccagcccccaccatcgccagccaacccctgtctctgagaccagaagcctgtaggcctgccgccggtggagctgtgcacacaagaggactggatttcgcctgtgatatctacatttgggccccgctcgcaggcacatgtggagtgctcctcctctccctggtgattaccctgtactgccgcgttaagttctcccgatcagccgacgcgcctgcttacaagcagggccagaaccaactgtacaacgagctgaatctcggtagacgggaagagtacgacgtgttggacaaacggagaggccgcgacccagaaatgggcggcaagcctcgcaggaaaaacccccaggagggactgtacaatgagttgcagaaagataagatggcagaagcttatagcgagatcggaatgaagggggaaaggagacgagggaaaggacacgacggcctttatcagggcctgtccacagcaacaaaagatacgtatgacgccctccatatgcaggcacttccaccacggtgataa

SEQ ID NO: 607 - protein, 451 aa, Artificial Sequence
  CAR-T C2 CD3z sequence
MALPVTALLLPLALLLHAARPEVQLVESGGGLVKPGGSLRLSCAASGFTFSGYAMSWVRQAPGKGLEWVSTISSGGTYIYYPDSVKGRFTISRDNAKNSLYLQMNSLRAEDTAVYYCARLGGDNYYEYFDVWGKGTTVTVSSGGGGSGGGGSGGGGSDIVLTQSPASLAVSPGQRATITCRASKSVSTSGYSYMHWYQQKPGQPPKLLIYLASNLESGVPARFSGSGSGTDFTLTINPVEANDTANYYCQHSRELPFTFGGGTKVEIKRTTTTPAPRPPTPAPTIASQPLSLRPEACRPAAGGAVHTRGLDFACDIYIWAPLAGTCGVLLLSLVITLYCRVKFSRSADAPAYKQGQNQLYNELNLGRREEYDVLDKRRGRDPEMGGKPRRKNPQEGLYNELQKDKMAEAYSEIGMKGERRRGKGHDGLYQGLSTATKDTYDALHMQALPPR

SEQ ID NO: 608 - DNA, 1482 bp, Artificial Sequence
  CAR-T C2 CD28/CD3z sequence
atggccttgccagtgacggccctgctgctgccattggctcttctgttgcacgctgccaggcctgaagtgcagctcgtagagagtggcgggggactggtgaagcccggtggaagcctcagactcagttgcgccgcctcaggtttcactttttcaggttacgccatgtcctgggtaagacaggcaccggggaaaggactcgagtgggtgtctactatcagctcaggaggcacttatatatattatcctgactctgtaaaaggccgatttacgatttctcgcgacaatgcaaagaactccctctacctccaaatgaacagtcttagggcagaagacactgctgtatactattgtgcacgcctcggcggcgacaactactacgagtactttgacgtgtgggggaaagggactaccgtgacagtttcaagcggaggaggtggctcaggtggaggcgggtcaggggggggaggaagtgatattgtgctcacacaatccccagcctccctggctgtgtctcccggccaacgcgctacaattacatgtcgggcctccaaaagcgtgagcaccagcggctacagctacatgcactggtatcaacagaaaccaggacaaccccccaaactgttgatttatctcgcttcaaacttggagtccggcgtgcctgcgcgcttttcagggagtgggagcggcacagattttacgctgactatcaaccccgtagaagcaaacgatacagcgaattattattgtcaacattcccgggaactcccctttacgttcggcgggggcacaaaggtcgaaattaagagaaccacgacaaccccggcccccagaccaccaacgccagcccccaccatcgccagccaacccctgtctctgagaccagaagcctgtaggcctgccgccggtggagctgtgcacacaagaggactggatttcgcctgtgatatctacatttgggccccgctcgcaggcacatgtggagtgctcctcctctccctggtgattaccctgtactgcagaagcaagcggtctcggctcctgcattctgattacatgaacatgaccccaagaagaccaggccccaccaggaaacattaccagccctacgctccgccacgcgacttcgctgcctaccggtcccgcgttaagttctcccgatcagccgacgcgcctgcttacaagcagggccagaaccaactgtacaacgagctgaatctcggtagacgggaagagtacgacgtgttggacaaacggagaggccgcgacccagaaatgggcggcaagcctcgcaggaaaaacccccaggagggactgtacaatgagttgcagaaagataagatggcagaagcttatagcgagatcggaatgaagggggaaaggagacgagggaaaggacacgacggcctttatcagggcctgtccacagcaacaaaagatacgtatgacgccctccatatgcaggcacttccaccacggtgataa

SEQ ID NO: 609 - protein, 492 aa, Artificial Sequence
  CAR-T C2 CD28/CD3z sequence
MALPVTALLLPLALLLHAARPEVQLVESGGGLVKPGGSLRLSCAASGFTFSGYAMSWVRQAPGKGLEWVSTISSGGTYIYYPDSVKGRFTISRDNAKNSLYLQMNSLRAEDTAVYYCARLGGDNYYEYFDVWGKGTTVTVSSGGGGSGGGGSGGGGSDIVLTQSPASLAVSPGQRATITCRASKSVSTSGYSYMHWYQQKPGQPPKLLIYLASNLESGVPARFSGSGSGTDFTLTINPVEANDTANYYCQHSRELPFTFGGGTKVEIKRTTTTPAPRPPTPAPTIASQPLSLRPEACRPAAGGAVHTRGLDFACDIYIWAPLAGTCGVLLLSLVITLYCRSKRSRLLHSDYMNMTPRRPGPTRKHYQPYAPPRDFAAYRSRVKFSRSADAPAYKQGQNQLYNELNLGRREEYDVLDKRRGRDPEMGGKPRRKNPQEGLYNELQKDKMAEAYSEIGMKGERRRGKGHDGLYQGLSTATKDTYDALHMQALPPR

SEQ ID NO: 610 - DNA, 1485 bp, Artificial Sequence
  CAR-T C2 4-1BB/CD3z sequence
atggccttgccagtgacggccctgctgctgccattggctcttctgttgcacgctgccaggcctgaagtgcagctcgtagagagtggcgggggactggtgaagcccggtggaagcctcagactcagttgcgccgcctcaggtttcactttttcaggttacgccatgtcctgggtaagacaggcaccggggaaaggactcgagtgggtgtctactatcagctcaggaggcacttatatatattatcctgactctgtaaaaggccgatttacgatttctcgcgacaatgcaaagaactccctctacctccaaatgaacagtcttagggcagaagacactgctgtatactattgtgcacgcctcggcggcgacaactactacgagtactttgacgtgtgggggaaagggactaccgtgacagtttcaagcggaggaggtggctcaggtggaggcgggtcaggggggggaggaagtgatattgtgctcacacaatccccagcctccctggctgtgtctcccggccaacgcgctacaattacatgtcgggcctccaaaagcgtgagcaccagcggctacagctacatgcactggtatcaacagaaaccaggacaaccccccaaactgttgatttatctcgcttcaaacttggagtccggcgtgcctgcgcgcttttcagggagtgggagcggcacagattttacgctgactatcaaccccgtagaagcaaacgatacagcgaattattattgtcaacattcccgggaactcccctttacgttcggcgggggcacaaaggtcgaaattaagagaaccacgacaaccccggcccccagaccaccaacgccagcccccaccatcgccagccaacccctgtctctgagaccagaagcctgtaggcctgccgccggtggagctgtgcacacaagaggactggatttcgcctgtgatatctacatttgggccccgctcgcaggcacatgtggagtgctcctcctctccctggtgattaccctgtactgcaaaaggggccgcaaaaaactcctttacatttttaagcagccttttatgaggccagtacagacgactcaagaggaagacgggtgctcatgccgctttcctgaggaggaggaaggagggtgcgaactgcgcgttaagttctcccgatcagccgacgcgcctgcttacaagcagggccagaaccaactgtacaacgagctgaatctcggtagacgggaagagtacgacgtgttggacaaacggagaggccgcgacccagaaatgggcggcaagcctcgcaggaaaaacccccaggagggactgtacaatgagttgcagaaagataagatggcagaagcttatagcgagatcggaatgaagggggaaaggagacgagggaaaggacacgacggcctttatcagggcctgtccacagcaacaaaagatacgtatgacgccctccatatgcaggcacttccaccacggtgataa

SEQ ID NO: 611 - protein, 493 aa, Artificial Sequence
  CAR-T C2 4-1BB/CD3z sequence
MALPVTALLLPLALLLHAARPEVQLVESGGGLVKPGGSLRLSCAASGFTFSGYAMSWVRQAPGKGLEWVSTISSGGTYIYYPDSVKGRFTISRDNAKNSLYLQMNSLRAEDTAVYYCARLGGDNYYEYFDVWGKGTTVTVSSGGGGSGGGGSGGGGSDIVLTQSPASLAVSPGQRATITCRASKSVSTSGYSYMHWYQQKPGQPPKLLIYLASNLESGVPARFSGSGSGTDFTLTINPVEANDTANYYCQHSRELPFTFGGGTKVEIKRTTTTPAPRPPTPAPTIASQPLSLRPEACRPAAGGAVHTRGLDFACDIYIWAPLAGTCGVLLLSLVITLYCKRGRKKLLYIFKQPFMRPVQTTQEEDGCSCRFPEEEEGGCELRVKFSRSADAPAYKQGQNQLYNELNLGRREEYDVLDKRRGRDPEMGGKPRRKNPQEGLYNELQKDKMAEAYSEIGMKGERRRGKGHDGLYQGLSTATKDTYDALHMQALPPR

SEQ ID NO: 612 - DNA, 1470 bp, Artificial Sequence
  CAR-T C2 OX40/CD3z sequence
atggccttgccagtgacggccctgctgctgccattggctcttctgttgcacgctgccaggcctgaagtgcagctcgtagagagtggcgggggactggtgaagcccggtggaagcctcagactcagttgcgccgcctcaggtttcactttttcaggttacgccatgtcctgggtaagacaggcaccggggaaaggactcgagtgggtgtctactatcagctcaggaggcacttatatatattatcctgactctgtaaaaggccgatttacgatttctcgcgacaatgcaaagaactccctctacctccaaatgaacagtcttagggcagaagacactgctgtatactattgtgcacgcctcggcggcgacaactactacgagtactttgacgtgtgggggaaagggactaccgtgacagtttcaagcggaggaggtggctcaggtggaggcgggtcaggggggggaggaagtgatattgtgctcacacaatccccagcctccctggctgtgtctcccggccaacgcgctacaattacatgtcgggcctccaaaagcgtgagcaccagcggctacagctacatgcactggtatcaacagaaaccaggacaaccccccaaactgttgatttatctcgcttcaaacttggagtccggcgtgcctgcgcgcttttcagggagtgggagcggcacagattttacgctgactatcaaccccgtagaagcaaacgatacagcgaattattattgtcaacattcccgggaactcccctttacgttcggcgggggcacaaaggtcgaaattaagagaaccacgacaaccccggcccccagaccaccaacgccagcccccaccatcgccagccaacccctgtctctgagaccagaagcctgtaggcctgccgccggtggagctgtgcacacaagaggactggatttcgcctgtgatatctacatttgggccccgctcgcaggcacatgtggagtgctcctcctctccctggtgattaccctgtactgccggagggaccagaggctgccccccgatgcccacaagccccctgggggaggcagtttccggacccccatccaagaggagcaggccgacgcccactccaccctggccaagatccgcgttaagttctcccgatcagccgacgcgcctgcttacaagcagggccagaaccaactgtacaacgagctgaatctcggtagacgggaagagtacgacgtgttggacaaacggagaggccgcgacccagaaatgggcggcaagcctcgcaggaaaaacccccaggagggactgtacaatgagttgcagaaagataagatggcagaagcttatagcgagatcggaatgaagggggaaaggagacgagggaaaggacacgacggcctttatcagggcctgtccacagcaacaaaagatacgtatgacgccctccatatgcaggcacttccaccacggtgataa

SEQ ID NO: 613 - protein, 488 aa, Artificial Sequence
  CAR-T C2 OX40/CD3z sequence
MALPVTALLLPLALLLHAARPEVQLVESGGGLVKPGGSLRLSCAASGFTFSGYAMSWVRQAPGKGLEWVSTISSGGTYIYYPDSVKGRFTISRDNAKNSLYLQMNSLRAEDTAVYYCARLGGDNYYEYFDVWGKGTTVTVSSGGGGSGGGGSGGGGSDIVLTQSPASLAVSPGQRATITCRASKSVSTSGYSYMHWYQQKPGQPPKLLIYLASNLESGVPARFSGSGSGTDFTLTINPVEANDTANYYCQHSRELPFTFGGGTKVEIKRTTTTPAPRPPTPAPTIASQPLSLRPEACRPAAGGAVHTRGLDFACDIYIWAPLAGTCGVLLLSLVITLYCRRDQRLPPDAHKPPGGGSFRTPIQEEQADAHSTLAKIRVKFSRSADAPAYKQGQNQLYNELNLGRREEYDVLDKRRGRDPEMGGKPRRKNPQEGLYNELQKDKMAEAYSEIGMKGERRRGKGHDGLYQGLSTATKDTYDALHMQALPPR

SEQ ID NO: 614 - DNA, 1593 bp, Artificial Sequence
  CAR-T C2 CD28/OX40/CD3z sequence
atggccttgccagtgacggccctgctgctgccattggctcttctgttgcacgctgccaggcctgaagtgcagctcgtagagagtggcgggggactggtgaagcccggtggaagcctcagactcagttgcgccgcctcaggtttcactttttcaggttacgccatgtcctgggtaagacaggcaccggggaaaggactcgagtgggtgtctactatcagctcaggaggcacttatatatattatcctgactctgtaaaaggccgatttacgatttctcgcgacaatgcaaagaactccctctacctccaaatgaacagtcttagggcagaagacactgctgtatactattgtgcacgcctcggcggcgacaactactacgagtactttgacgtgtgggggaaagggactaccgtgacagtttcaagcggaggaggtggctcaggtggaggcgggtcaggggggggaggaagtgatattgtgctcacacaatccccagcctccctggctgtgtctcccggccaacgcgctacaattacatgtcgggcctccaaaagcgtgagcaccagcggctacagctacatgcactggtatcaacagaaaccaggacaaccccccaaactgttgatttatctcgcttcaaacttggagtccggcgtgcctgcgcgcttttcagggagtgggagcggcacagattttacgctgactatcaaccccgtagaagcaaacgatacagcgaattattattgtcaacattcccgggaactcccctttacgttcggcgggggcacaaaggtcgaaattaagagaaccacgacaaccccggcccccagaccaccaacgccagcccccaccatcgccagccaacccctgtctctgagaccagaagcctgtaggcctgccgccggtggagctgtgcacacaagaggactggatttcgcctgtgatatctacatttgggccccgctcgcaggcacatgtggagtgctcctcctctccctggtgattaccctgtactgcagaagcaagcggtctcggctcctgcattctgattacatgaacatgaccccaagaagaccaggccccaccaggaaacattaccagccctacgctccgccacgcgacttcgctgcctaccggtcccggagggaccagaggctgccccccgatgcccacaagccccctgggggaggcagtttccggacccccatccaagaggagcaggccgacgcccactccaccctggccaagatccgcgttaagttctcccgatcagccgacgcgcctgcttacaagcagggccagaaccaactgtacaacgagctgaatctcggtagacgggaagagtacgacgtgttggacaaacggagaggccgcgacccagaaatgggcggcaagcctcgcaggaaaaacccccaggagggactgtacaatgagttgcagaaagataagatggcagaagcttatagcgagatcggaatgaagggggaaaggagacgagggaaaggacacgacggcctttatcagggcctgtccacagcaacaaaagatacgtatgacgccctccatatgcaggcacttccaccacggtgataa

SEQ ID NO: 615 - protein, 529 aa, Artificial Sequence
  CAR-T C2 CD28/OX40/CD3z sequence
MALPVTALLLPLALLLHAARPEVQLVESGGGLVKPGGSLRLSCAASGFTFSGYAMSWVRQAPGKGLEWVSTISSGGTYIYYPDSVKGRFTISRDNAKNSLYLQMNSLRAEDTAVYYCARLGGDNYYEYFDVWGKGTTVTVSSGGGGSGGGGSGGGGSDIVLTQSPASLAVSPGQRATITCRASKSVSTSGYSYMHWYQQKPGQPPKLLIYLASNLESGVPARFSGSGSGTDFTLTINPVEANDTANYYCQHSRELPFTFGGGTKVEIKRTTTTPAPRPPTPAPTIASQPLSLRPEACRPAAGGAVHTRGLDFACDIYIWAPLAGTCGVLLLSLVITLYCRSKRSRLLHSDYMNMTPRRPGPTRKHYQPYAPPRDFAAYRSRRDQRLPPDAHKPPGGGSFRTPIQEEQADAHSTLAKIRVKFSRSADAPAYKQGQNQLYNELNLGRREEYDVLDKRRGRDPEMGGKPRRKNPQEGLYNELQKDKMAEAYSEIGMKGERRRGKGHDGLYQGLSTATKDTYDALHMQALPPR

SEQ ID NO: 616 - DNA, 1452 bp, Artificial Sequence
  CAR-T E6 OX40/CD3z sequence
atggccctgcccgtgaccgctttgctgctccccctggcgctgctgctgcacgccgccaggccagaggtccagctggttgagagtggcggtgggctggttaagcctggcggctccctgcggctgagctgcgccgcgagtggatttactttcagccgatatgggatgagttgggtgcggcaagctcccgggaagaggctggaatgggtctcaacaatctccggggggggcacttacatctattaccccgactcagtcaaggggagatttaccatttcacgagacaacgctaagaataccctgtatttgcagatgaattctctgagagcagaggacacagctgtttactattgtacccgcgacaactatggcaggaactacgactacggtatggactattggggacaagggacattggttacagtgagcagtggcggcgggggcagcggaggaggaggcagcggtggggggggcagcgagatagtgctcacgcagtcacccgcgactctcagtctctcacctggggaacgagctaccctgacgtgctctgctacctcctcagtgtcatatattcactggtatcagcaacggcccgggcagtcccctagattgctcatttatagtacctctaatctggcctcaggtatccctgcacgattttctggatctggttcaggttctgattacaccctcactatctctagcctggagcctgaagactttgccgtttattactgccagcagaggtctagctccccattcacctttgggagtgggaccaaggttgaaattaaaacgacaaccccggcccccagaccaccaacgccagcccccaccatcgccagccaacccctgtctctgagaccagaagcctgtaggcctgccgccggtggagctgtgcacacaagaggactggatttcgcctgtgatatctacatttgggccccgctcgcaggcacatgtggagtgctcctcctctccctggtgattaccctgtactgccggagggaccagaggctgccccccgatgcccacaagccccctgggggaggcagtttccggacccccatccaagaggagcaggccgacgcccactccaccctggccaagatccgcgttaagttctcccgatcagccgacgcgcctgcttacaagcagggccagaaccaactgtacaacgagctgaatctcggtagacgggaagagtacgacgtgttggacaaacggagaggccgcgacccagaaatgggcggcaagcctcgcaggaaaaacccccaggagggactgtacaatgagttgcagaaagataagatggcagaagcttatagcgagatcggaatgaagggggaaaggagacgagggaaaggacacgacggcctttatcagggcctgtccacagcaacaaaagatacgtatgacgccctccatatgcaggcacttccaccacggtgataa

SEQ ID NO: 617 - protein, 482 aa, Artificial Sequence
  CAR-T E6 OX40/CD3z sequence
MALPVTALLLPLALLLHAARPEVQLVESGGGLVKPGGSLRLSCAASGFTFSRYGMSWVRQAPGKRLEWVSTISGGGTYIYYPDSVKGRFTISRDNAKNTLYLQMNSLRAEDTAVYYCTRDNYGRNYDYGMDYWGQGTLVTVSSGGGGSGGGGSGGGGSEIVLTQSPATLSLSPGERATLTCSATSSVSYIHWYQQRPGQSPRLLIYSTSNLASGIPARFSGSGSGSDYTLTISSLEPEDFAVYYCQQRSSSPFTFGSGTKVEIKTTTPAPRPPTPAPTIASQPLSLRPEACRPAAGGAVHTRGLDFACDIYIWAPLAGTCGVLLLSLVITLYCRRDQRLPPDAHKPPGGGSFRTPIQEEQADAHSTLAKIRVKFSRSADAPAYKQGQNQLYNELNLGRREEYDVLDKRRGRDPEMGGKPRRKNPQEGLYNELQKDKMAEAYSEIGMKGERRRGKGHDGLYQGLSTATKDTYDALHMQALPPR

SEQ ID NO: 618 - DNA, 1575 bp, Artificial Sequence
  CAR-T E6 CD28/OX40/CD3z sequence
atggccctgcccgtgaccgctttgctgctccccctggcgctgctgctgcacgccgccaggccagaggtccagctggttgagagtggcggtgggctggttaagcctggcggctccctgcggctgagctgcgccgcgagtggatttactttcagccgatatgggatgagttgggtgcggcaagctcccgggaagaggctggaatgggtctcaacaatctccggggggggcacttacatctattaccccgactcagtcaaggggagatttaccatttcacgagacaacgctaagaataccctgtatttgcagatgaattctctgagagcagaggacacagctgtttactattgtacccgcgacaactatggcaggaactacgactacggtatggactattggggacaagggacattggttacagtgagcagtggcggcgggggcagcggaggaggaggcagcggtggggggggcagcgagatagtgctcacgcagtcacccgcgactctcagtctctcacctggggaacgagctaccctgacgtgctctgctacctcctcagtgtcatatattcactggtatcagcaacggcccgggcagtcccctagattgctcatttatagtacctctaatctggcctcaggtatccctgcacgattttctggatctggttcaggttctgattacaccctcactatctctagcctggagcctgaagactttgccgtttattactgccagcagaggtctagctccccattcacctttgggagtgggaccaaggttgaaattaaaacgacaaccccggcccccagaccaccaacgccagcccccaccatcgccagccaacccctgtctctgagaccagaagcctgtaggcctgccgccggtggagctgtgcacacaagaggactggatttcgcctgtgatatctacatttgggccccgctcgcaggcacatgtggagtgctcctcctctccctggtgattaccctgtactgcagaagcaagcggtctcggctcctgcattctgattacatgaacatgaccccaagaagaccaggccccaccaggaaacattaccagccctacgctccgccacgcgacttcgctgcctaccggtcccggagggaccagaggctgccccccgatgcccacaagccccctgggggaggcagtttccggacccccatccaagaggagcaggccgacgcccactccaccctggccaagatccgcgttaagttctcccgatcagccgacgcgcctgcttacaagcagggccagaaccaactgtacaacgagctgaatctcggtagacgggaagagtacgacgtgttggacaaacggagaggccgcgacccagaaatgggcggcaagcctcgcaggaaaaacccccaggagggactgtacaatgagttgcagaaagataagatggcagaagcttatagcgagatcggaatgaagggggaaaggagacgagggaaaggacacgacggcctttatcagggcctgtccacagcaacaaaagatacgtatgacgccctccatatgcaggcacttccaccacggtgataa

SEQ ID NO: 619 - protein, 523 aa, Artificial Sequence
  CAR-T E6 CD28/OX40/CD3z sequence
MALPVTALLLPLALLLHAARPEVQLVESGGGLVKPGGSLRLSCAASGFTFSRYGMSWVRQAPGKRLEWVSTISGGGTYIYYPDSVKGRFTISRDNAKNTLYLQMNSLRAEDTAVYYCTRDNYGRNYDYGMDYWGQGTLVTVSSGGGGSGGGGSGGGGSEIVLTQSPATLSLSPGERATLTCSATSSVSYIHWYQQRPGQSPRLLIYSTSNLASGIPARFSGSGSGSDYTLTISSLEPEDFAVYYCQQRSSSPFTFGSGTKVEIKTTTPAPRPPTPAPTIASQPLSLRPEACRPAAGGAVHTRGLDFACDIYIWAPLAGTCGVLLLSLVITLYCRSKRSRLLHSDYMNMTPRRPGPTRKHYQPYAPPRDFAAYRSRRDQRLPPDAHKPPGGGSFRTPIQEEQADAHSTLAKIRVKFSRSADAPAYKQGQNQLYNELNLGRREEYDVLDKRRGRDPEMGGKPRRKNPQEGLYNELQKDKMAEAYSEIGMKGERRRGKGHDGLYQGLSTATKDTYDALHMQALPPR

SEQ ID NO: 620 - protein, 43 aa, Artificial Sequence
  MUC1 FRAGMENT
SNIKFRPGSVVVQLTLAFREGTINVHDVETQFNQYKTEAASRY

SEQ ID NO: 621 - protein, 35 aa, Artificial Sequence
  MUC1 FRAGMENT
SVVVQLTLAFREGTINVHDVETQFNQYKTEAASRY

SEQ ID NO: 622 - protein, 24 aa, Artificial Sequence
  Cytoplasmic MUC1 truncated segment
VQLTLAFREGTINVHDVETQFNQY

SEQ ID NO: 623 - protein, 24 aa, Artificial Sequence
  Cytoplasmic MUC1 truncated segment
SNIKFRPGSVVVQLTLAFREGTIN

SEQ ID NO: 624 - DNA, 28 bp, Artificial Sequence
  Primer
attctaagcttgggccaccatggaactg

SEQ ID NO: 625 - DNA, 41 bp, Artificial Sequence
  Primer
tctagagtttaaacttactatttacccggagacagggagag

SEQ ID NO: 626 - DNA, 41 bp, Artificial Sequence
  Primer
agtatggcccagccggccgaggtgcagctggtggagtctgg

SEQ ID NO: 627 - DNA, 26 bp, Artificial Sequence
  Primer
tagaaggcacagtcgaggctgatcag

SEQ ID NO: 628 - DNA, 27 bp, Artificial Sequence
  Primer
attctaagcttgggccaccatggaagc

SEQ ID NO: 629 - DNA, 40 bp, Artificial Sequence
  Primer
tctagagtttaaacttactaacactctcccctgttgaagc

SEQ ID NO: 630 - DNA, 43 bp, Artificial Sequence
  Primer
agtatggcccagccggccgaaattgtgttgacacagtctccag

SEQ ID NO: 631 - DNA, 26 bp, Artificial Sequence
  Primer
tagaaggcacagtcgaggctgatcag

SEQ ID NO: 632 - DNA, 33 bp, Artificial Sequence
  Primer
actgtcatatggaggtgcagctggtggagtctg

SEQ ID NO: 633 - DNA, 37 bp, Artificial Sequence
  Primer
actgtctcgagtttaatttccactttggtgccgctgc

SEQ ID NO: 634 - DNA, 33 bp, Artificial Sequence; identical to SEQ ID NO: 632
  Primer

SEQ ID NO: 635 - DNA, 37 bp, Artificial Sequence
  Primer
actgtaccggttttaatttccactttggtgccgctgc

SEQ ID NO: 636 - DNA, 29 bp, Artificial Sequence
  Primer
cttcttcctcaggagcaagctcaccgtgg

SEQ ID NO: 637 - DNA, 18 bp, Artificial Sequence
  Primer
gagccgtcggagtccagc

SEQ ID NO: 638 - DNA, 18 bp, Artificial Sequence
  Primer
gcacctgaactcctgggg

SEQ ID NO: 639 - DNA, 22 bp, Artificial Sequence
  Primer
tttaatttccactttggtgccg

SEQ ID NO: 640 - DNA, 32 bp, Artificial Sequence
  Primer
cgcggctagcttaagcttggtaccgagggcca

SEQ ID NO: 641 - DNA, 36 bp, Artificial Sequence
  Primer
cgcggcggccgcctgatcagcgggtttaaacttatc

SEQ ID NO: 642 - DNA, 2151 bp, Artificial Sequence
  MMP9
atgagcctctggcagcccctggtcctggtgctcctggtgctgggctgctgctttgctgcccccagacagcgccagtccacccttgtgctcttccctggagacctgagaaccaatctcaccgacaggcagctggcagaggaatacctgtaccgctatggttacactcgggtggcagagatgcgtggagagtcgaaatctctggggcctgcgctgctgcttctccagaagcaactgtccctgcccgagaccggtgagctggatagcgccacgctgaaggccatgcgaaccccacggtgcggggtcccagacctgggcagattccaaacctttgagggcgacctcaagtggcaccaccacaacatcacctattggatccaaaactactcggaagacttgccgcgggcggtgattgacgacgcctttgcccgcgccttcgcactgtggagcgcggtgacgccgctcaccttcactcgcgtgtacagccgggacgcagacatcgtcatccagtttggtgtcgcggagcacggagacgggtatcccttcgacgggaaggacgggctcctggcacacgcctttcctcctggccccggcattcagggagacgcccatttcgacgatgacgagttgtggtccctgggcaagggcgtcgtggttccaactcggtttggaaacgcagatggcgcggcctgccacttccccttcatcttcgagggccgctcctactctgcctgcaccaccgacggtcgctccgacggcttgccctggtgcagtaccacggccaactacgacaccgacgaccggtttggcttctgccccagcgagagactctacacccaggacggcaatgctgatgggaaaccctgccagtttccattcatcttccaaggccaatcctactccgcctgcaccacggacggtcgctccgacggctaccgctggtgcgccaccaccgccaactacgaccgggacaagctcttcggcttctgcccgacccgagctgactcgacggtgatggggggcaactcggcgggggagctgtgcgtcttccccttcactttcctgggtaaggagtactcgacctgtaccagcgagggccgcggagatgggcgcctctggtgcgctaccacctcgaactttgacagcgacaagaagtggggcttctgcccggaccaaggatacagtttgttcctcgtggcggcgcatgagttcggccacgcgctgggcttagatcattcctcagtgccggaggcgctcatgtaccctatgtaccgcttcactgaggggccccccttgcataaggacgacgtgaatggcatccggcacctctatggtcctcgccctgaacctgagccacggcctccaaccaccaccacaccgcagcccacggctcccccgacggtctgccccaccggaccccccactgtccacccctcagagcgccccacagctggccccacaggtcccccctcagctggccccacaggtccccccactgctggcccttctacggccactactgtgcctttgagtccggtggacgatgcctgcaacgtgaacatcttcgacgccatcgcggagattgggaaccagctgtatttgttcaaggatgggaagtactggcgattctctgagggcagggggagccggccgcagggccccttccttatcgccgacaagtggcccgcgctgccccgcaagctggactcggtctttgaggagcggctctccaagaagcttttcttcttctctgggcgccaggtgtgggtgtacacaggcgcgtcggtgctgggcccgaggcgtctggacaagctgggcctgggagccgacgtggcccaggtgaccggggccctccggagtggcagggggaagatgctgctgttcagcgggcggcgcctctggaggttcgacgtgaaggcgcagatggtggatccccggagcgccagcgaggtggaccggatgttccccggggtgcctttggacacgcacgacgtcttccagtaccgagagaaagcctatttctgccaggaccgcttctactggcgcgtgagttcccggagtgagttgaaccaggtggaccaagtgggctacgtgacctatgacatcctgcagtgccctgaggacgattacaaggatgacgacgataagtgataa

SEQ ID NO: 643 - protein, 715 aa, Artificial Sequence
  MMP9
MSLWQPLVLVLLVLGCCFAAPRQRQSTLVLFPGDLRTNLTDRQLAEEYLYRYGYTRVAEMRGESKSLGPALLLLQKQLSLPETGELDSATLKAMRTPRCGVPDLGRFQTFEGDLKWHHHNITYWIQNYSEDLPRAVIDDAFARAFALWSAVTPLTFTRVYSRDADIVIQFGVAEHGDGYPFDGKDGLLAHAFPPGPGIQGDAHFDDDELWSLGKGVVVPTRFGNADGAACHFPFIFEGRSYSACTTDGRSDGLPWCSTTANYDTDDRFGFCPSERLYTQDGNADGKPCQFPFIFQGQSYSACTTDGRSDGYRWCATTANYDRDKLFGFCPTRADSTVMGGNSAGELCVFPFTFLGKEYSTCTSEGRGDGRLWCATTSNFDSDKKWGFCPDQGYSLFLVAAHEFGHALGLDHSSVPEALMYPMYRFTEGPPLHKDDVNGIRHLYGPRPEPEPRPPTTTTPQPTAPPTVCPTGPPTVHPSERPTAGPTGPPSAGPTGPPTAGPSTATTVPLSPVDDACNVNIFDAIAEIGNQLYLFKDGKYWRFSEGRGSRPQGPFLIADKWPALPRKLDSVFEERLSKKLFFFSGRQVWVYTGASVLGPRRLDKLGLGADVAQVTGALRSGRGKMLLFSGRRLWRFDVKAQMVDPRSASEVDRMFPGVPLDTHDVFQYREKAYFCQDRFYWRVSSRSELNQVDQVGYVTYDILQCPEDDYKDDDDK

SEQ ID NO: 644 - DNA, 1062 bp, Artificial Sequence
  MMP9 catalytic domain
atgttccaaacctttgagggcgacctcaagtggcaccaccacaacatcacctattggatccaaaactactcggaagacttgccgcgggcggtgattgacgacgcctttgcccgcgccttcgcactgtggagcgcggtgacgccgctcaccttcactcgcgtgtacagccgggacgcagacatcgtcatccagtttggtgtcgcggagcacggagacgggtatcccttcgacgggaaggacgggctcctggcacacgcctttcctcctggccccggcattcagggagacgcccatttcgacgatgacgagttgtggtccctgggcaagggcgtcgtggttccaactcggtttggaaacgcagatggcgcggcctgccacttccccttcatcttcgagggccgctcctactctgcctgcaccaccgacggtcgctccgacggcttgccctggtgcagtaccacggccaactacgacaccgacgaccggtttggcttctgccccagcgagagactctacacccaggacggcaatgctgatgggaaaccctgccagtttccattcatcttccaaggccaatcctactccgcctgcaccacggacggtcgctccgacggctaccgctggtgcgccaccaccgccaactacgaccgggacaagctcttcggcttctgcccgacccgagctgactcgacggtgatggggggcaactcggcgggggagctgtgcgtcttccccttcactttcctgggtaaggagtactcgacctgtaccagcgagggccgcggagatgggcgcctctggtgcgctaccacctcgaactttgacagcgacaagaagtggggcttctgcccggaccaaggatacagtttgttcctcgtggcggcgcatgagttcggccacgcgctgggcttagatcattcctcagtgccggaggcgctcatgtaccctatgtaccgcttcactgaggggccccccttgcataaggacgacgtgaatggcatccggcacctctatggtcctcgccctgaacctgattacaaggatgacgacgataagtgataa

SEQ ID NO: 645 - protein, 352 aa, Artificial Sequence
  MMP9
MFQTFEGDLKWHHHNITYWIQNYSEDLPRAVIDDAFARAFALWSAVTPLTFTRVYSRDADIVIQFGVAEHGDGYPFDGKDGLLAHAFPPGPGIQGDAHFDDDELWSLGKGVVVPTRFGNADGAACHFPFIFEGRSYSACTTDGRSDGLPWCSTTANYDTDDRFGFCPSERLYTQDGNADGKPCQFPFIFQGQSYSACTTDGRSDGYRWCATTANYDRDKLFGFCPTRADSTVMGGNSAGELCVFPFTFLGKEYSTCTSEGRGDGRLWCATTSNFDSDKKWGFCPDQGYSLFLVAAHEFGHALGLDHSSVPEALMYPMYRFTEGPPLHKDDVNGIRHLYGPRPEPDYKDDDDK

SEQ ID NO: 646 - DNA, 2186 bp, Artificial Sequence
  NFATc1 Promoter (NFATc1P)
aggcaggaggaagaggaaaggggcgcagggcgctcggggagcagagccgggggcccgcggtggccgcagaggccgggccggggcgcagaggccgggcgagctggccgcgctctgggccgccgcctccggaactccctgcgcctggcgcgcggccaccgtggtcccggcaacggcattaaacagagggaaacagacccgggattccgtcacccgggcggggggataaggacggctttgagagcagacaggaaaagggagcttttctgcatggggtgaaaaaattatttattgaaggaggaggaggcggcagcggaggaaggggaggggcgggaggaggaggaagagccggccgcccccgccccggccccggctcctcaggagccaagggcagcctcgccaggtcggtcccgggctcgaggaccgcggctggggtcgaggggctcagtctcccacgtgaccggctgggcgcgccccgccagacccggcctcgggattccctcctcccggcgagtctccgcccgccccgtcctggaggtggggagaaggagggcggggcgggggggacggaaactctccccgccaaatcctggccccaggcctggggacactcgcggcgggaagatttggaggggaggggagggggaggggcgtgggggcgcggcctcgctggagtccccctgaccccccgacccccgcccaccggcctgggcgtcctcccgcggcccctcctcccctcccggcgcccggtgctctggggcgcgtgccacgcctggctcggcgccgtaggggcccccgcaggtagagacccctggaaatggcctcgacgccgcaggagcgaggcggccaccaccccgctaatccgggcacgtctctccaggccgaggcctgcggtggaaaagccggggttccatttgtgctgagtcggggcggccgaatggagccaggcctcgggacgcgggacggacgggctctggccgcgcaccttcgcgggctctgcagcgcccgaccgcctcccccggcagggaggaggcgcttgtggggggcacccacggggcacagtgatccctgggggtctgcggacctcctgggccccgcagcagacacgagtttagcctttgggtttagtttaaatcacataagggtgtcgtgcaatcgatttatggtttctacacaccagacactttaacctccaaccccccccatccaagccaacaagaaaatgcggtgccgtgttggcagctgagctgcgcccgaagagacgcagggagacgtaagagaggaaagtgtgagtggccggggggcctccccccgtcagaagtcgcgcagtcgcgcccataaaacgccccctccgggcggctagggcaggtgagcgcgtccccgggcctccccacgccggcccctgccacagagccgtctaggtcgagcagatatttacagaataaaaatgacaataactcgacgtcccgggacggccacgcaatctgttagtaatttagcgggatgggaatttcctttctagggcctgccagtgaagcgcttttccaaatttccacagcgggggaagcctgcgattttacataatgacttcagcatgccgggctttctcgacacccctccccggcccccggcccccgccccccgccccttttccagcagggccgggctccctccggacacccgcgtggactcaggcgtcccgtctggcccgttcgcccccgtttcccccgccagccccagcgcccccctgcccggcccccggattccccgttcccgcccctacgcccccatcccctccccgtgcgcccctccccgtgcgcccccctccccgtgcgccccccctccccgtgcgcccccctccccgtgcgccccccctccccgggcgcccccctccccgggcgccccccctccccgtgcgcccccccctccccgtgcgccccccctccccgtgcgcgccccgcctcttgcgcccctgcccccaggcgagcggctgccgcggcgcggggaggggcgggcgctcggcgactcgtccccggggccccgcgcgggcccgggcagcaggggcgtgatgtcacggcagggagggggcgcgggagccgccgggccggcggggaggcgggggaggtgttttccagctttaaaaaggcaggaggcagagcgcggccctgcgtcagagcgagactcagagg

SEQ ID NO: 647 - DNA, 4349 bp, Artificial Sequence
  NFATc1P-MMP9
aggcaggaggaagaggaaaggggcgcagggcgctcggggagcagagccgggggcccgcggtggccgcagaggccgggccggggcgcagaggccgggcgagctggccgcgctctgggccgccgcctccggaactccctgcgcctggcgcgcggccaccgtggtcccggcaacggcattaaacagagggaaacagacccgggattccgtcacccgggcggggggataaggacggctttgagagcagacaggaaaagggagcttttctgcatggggtgaaaaaattatttattgaaggaggaggaggcggcagcggaggaaggggaggggcgggaggaggaggaagagccggccgcccccgccccggccccggctcctcaggagccaagggcagcctcgccaggtcggtcccgggctcgaggaccgcggctggggtcgaggggctcagtctcccacgtgaccggctgggcgcgccccgccagacccggcctcgggattccctcctcccggcgagtctccgcccgccccgtcctggaggtggggagaaggagggcggggcgggggggacggaaactctccccgccaaatcctggccccaggcctggggacactcgcggcgggaagatttggaggggaggggagggggaggggcgtgggggcgcggcctcgctggagtccccctgaccccccgacccccgcccaccggcctgggcgtcctcccgcggcccctcctcccctcccggcgcccggtgctctggggcgcgtgccacgcctggctcggcgccgtaggggcccccgcaggtagagacccctggaaatggcctcgacgccgcaggagcgaggcggccaccaccccgctaatccgggcacgtctctccaggccgaggcctgcggtggaaaagccggggttccatttgtgctgagtcggggcggccgaatggagccaggcctcgggacgcgggacggacgggctctggccgcgcaccttcgcgggctctgcagcgcccgaccgcctcccccggcagggaggaggcgcttgtggggggcacccacggggcacagtgatccctgggggtctgcggacctcctgggccccgcagcagacacgagtttagcctttgggtttagtttaaatcacataagggtgtcgtgcaatcgatttatggtttctacacaccagacactttaacctccaaccccccccatccaagccaacaagaaaatgcggtgccgtgttggcagctgagctgcgcccgaagagacgcagggagacgtaagagaggaaagtgtgagtggccggggggcctccccccgtcagaagtcgcgcagtcgcgcccataaaacgccccctccgggcggctagggcaggtgagcgcgtccccgggcctccccacgccggcccctgccacagagccgtctaggtcgagcagatatttacagaataaaaatgacaataactcgacgtcccgggacggccacgcaatctgttagtaatttagcgggatgggaatttcctttctagggcctgccagtgaagcgcttttccaaatttccacagcgggggaagcctgcgattttacataatgacttcagcatgccgggctttctcgacacccctccccggcccccggcccccgccccccgccccttttccagcagggccgggctccctccggacacccgcgtggactcaggcgtcccgtctggcccgttcgcccccgtttcccccgccagccccagcgcccccctgcccggcccccggattccccgttcccgcccctacgcccccatcccctccccgtgcgcccctccccgtgcgcccccctccccgtgcgccccccctccccgtgcgcccccctccccgtgcgccccccctccccgggcgcccccctccccgggcgccccccctccccgtgcgcccccccctccccgtgcgccccccctccccgtgcgcgccccgcctcttgcgcccctgcccccaggcgagcggctgccgcggcgcggggaggggcgggcgctcggcgactcgtccccggggccccgcgcgggcccgggcagcaggggcgtgatgtcacggcagggagggggcgcgggagccgccgggccggcggggaggcgggggaggtgttttccagctttaaaaaggcaggaggcagagcgcggccctgcgtcagagcgagactcagaggtctagagccaccatgagcctctggcagcccctggtcctggtgctcctggtgctgggctgctgctttgctgcccccagacagcgccagtccacccttgtgctcttccctggagacctgagaaccaatctcaccgacaggcagctggcagaggaatacctgtaccgctatggttacactcgggtggcagagatgcgtggagagtcgaaatctctggggcctgcgctgctgcttctccagaagcaactgtccctgcccgagaccggtgagctggatagcgccacgctgaaggccatgcgaaccccacggtgcggggtcccagacctgggcagattccaaacctttgagggcgacctcaagtggcaccaccacaacatcacctattggatccaaaactactcggaagacttgccgcgggcggtgattgacgacgcctttgcccgcgccttcgcactgtggagcgcggtgacgccgctcaccttcactcgcgtgtacagccgggacgcagacatcgtcatccagtttggtgtcgcggagcacggagacgggtatcccttcgacgggaaggacgggctcctggcacacgcctttcctcctggccccggcattcagggagacgcccatttcgacgatgacgagttgtggtccctgggcaagggcgtcgtggttccaactcggtttggaaacgcagatggcgcggcctgccacttccccttcatcttcgagggccgctcctactctgcctgcaccaccgacggtcgctccgacggcttgccctggtgcagtaccacggccaactacgacaccgacgaccggtttggcttctgccccagcgagagactctacacccaggacggcaatgctgatgggaaaccctgccagtttccattcatcttccaaggccaatcctactccgcctgcaccacggacggtcgctccgacggctaccgctggtgcgccaccaccgccaactacgaccgggacaagctcttcggcttctgcccgacccgagctgactcgacggtgatggggggcaactcggcgggggagctgtgcgtcttccccttcactttcctgggtaaggagtactcgacctgtaccagcgagggccgcggagatgggcgcctctggtgcgctaccacctcgaactttgacagcgacaagaagtggggcttctgcccggaccaaggatacagtttgttcctcgtggcggcgcatgagttcggccacgcgctgggcttagatcattcctcagtgccggaggcgctcatgtaccctatgtaccgcttcactgaggggccccccttgcataaggacgacgtgaatggcatccggcacctctatggtcctcgccctgaacctgagccacggcctccaaccaccaccacaccgcagcccacggctcccccgacggtctgccccaccggaccccccactgtccacccctcagagcgccccacagctggccccacaggtcccccctcagctggccccacaggtccccccactgctggcccttctacggccactactgtgcctttgagtccggtggacgatgcctgcaacgtgaacatcttcgacgccatcgcggagattgggaaccagctgtatttgttcaaggatgggaagtactggcgattctctgagggcagggggagccggccgcagggccccttccttatcgccgacaagtggcccgcgctgccccgcaagctggactcggtctttgaggagcggctctccaagaagcttttcttcttctctgggcgccaggtgtgggtgtacacaggcgcgtcggtgctgggcccgaggcgtctggacaagctgggcctgggagccgacgtggcccaggtgaccggggccctccggagtggcagggggaagatgctgctgttcagcgggcggcgcctctggaggttcgacgtgaaggcgcagatggtggatccccggagcgccagcgaggtggaccggatgttccccggggtgcctttggacacgcacgacgtcttccagtaccgagagaaagcctatttctgccaggaccgcttctactggcgcgtgagttcccggagtgagttgaaccaggtggaccaagtgggctacgtgacctatgacatcctgcagtgccctgaggacgattacaaggatgacgacgataagtgataa

SEQ ID NO: 648 - DNA, 3260 bp, Artificial Sequence
  NFATc1P-MMP9cat
aggcaggaggaagaggaaaggggcgcagggcgctcggggagcagagccgggggcccgcggtggccgcagaggccgggccggggcgcagaggccgggcgagctggccgcgctctgggccgccgcctccggaactccctgcgcctggcgcgcggccaccgtggtcccggcaacggcattaaacagagggaaacagacccgggattccgtcacccgggcggggggataaggacggctttgagagcagacaggaaaagggagcttttctgcatggggtgaaaaaattatttattgaaggaggaggaggcggcagcggaggaaggggaggggcgggaggaggaggaagagccggccgcccccgccccggccccggctcctcaggagccaagggcagcctcgccaggtcggtcccgggctcgaggaccgcggctggggtcgaggggctcagtctcccacgtgaccggctgggcgcgccccgccagacccggcctcgggattccctcctcccggcgagtctccgcccgccccgtcctggaggtggggagaaggagggcggggcgggggggacggaaactctccccgccaaatcctggccccaggcctggggacactcgcggcgggaagatttggaggggaggggagggggaggggcgtgggggcgcggcctcgctggagtccccctgaccccccgacccccgcccaccggcctgggcgtcctcccgcggcccctcctcccctcccggcgcccggtgctctggggcgcgtgccacgcctggctcggcgccgtaggggcccccgcaggtagagacccctggaaatggcctcgacgccgcaggagcgaggcggccaccaccccgctaatccgggcacgtctctccaggccgaggcctgcggtggaaaagccggggttccatttgtgctgagtcggggcggccgaatggagccaggcctcgggacgcgggacggacgggctctggccgcgcaccttcgcgggctctgcagcgcccgaccgcctcccccggcagggaggaggcgcttgtggggggcacccacggggcacagtgatccctgggggtctgcggacctcctgggccccgcagcagacacgagtttagcctttgggtttagtttaaatcacataagggtgtcgtgcaatcgatttatggtttctacacaccagacactttaacctccaaccccccccatccaagccaacaagaaaatgcggtgccgtgttggcagctgagctgcgcccgaagagacgcagggagacgtaagagaggaaagtgtgagtggccggggggcctccccccgtcagaagtcgcgcagtcgcgcccataaaacgccccctccgggcggctagggcaggtgagcgcgtccccgggcctccccacgccggcccctgccacagagccgtctaggtcgagcagatatttacagaataaaaatgacaataactcgacgtcccgggacggccacgcaatctgttagtaatttagcgggatgggaatttcctttctagggcctgccagtgaagcgcttttccaaatttccacagcgggggaagcctgcgattttacataatgacttcagcatgccgggctttctcgacacccctccccggcccccggcccccgccccccgccccttttccagcagggccgggctccctccggacacccgcgtggactcaggcgtcccgtctggcccgttcgcccccgtttcccccgccagccccagcgcccccctgcccggcccccggattccccgttcccgcccctacgcccccatcccctccccgtgcgcccctccccgtgcgcccccctccccgtgcgccccccctccccgtgcgcccccctccccgtgcgccccccctccccgggcgcccccctccccgggcgccccccctccccgtgcgcccccccctccccgtgcgccccccctccccgtgcgcgccccgcctcttgcgcccctgcccccaggcgagcggctgccgcggcgcggggaggggcgggcgctcggcgactcgtccccggggccccgcgcgggcccgggcagcaggggcgtgatgtcacggcagggagggggcgcgggagccgccgggccggcggggaggcgggggaggtgttttccagctttaaaaaggcaggaggcagagcgcggccctgcgtcagagcgagactcagaggtctagagccaccatgttccaaacctttgagggcgacctcaagtggcaccaccacaacatcacctattggatccaaaactactcggaagacttgccgcgggcggtgattgacgacgcctttgcccgcgccttcgcactgtggagcgcggtgacgccgctcaccttcactcgcgtgtacagccgggacgcagacatcgtcatccagtttggtgtcgcggagcacggagacgggtatcccttcgacgggaaggacgggctcctggcacacgcctttcctcctggccccggcattcagggagacgcccatttcgacgatgacgagttgtggtccctgggcaagggcgtcgtggttccaactcggtttggaaacgcagatggcgcggcctgccacttccccttcatcttcgagggccgctcctactctgcctgcaccaccgacggtcgctccgacggcttgccctggtgcagtaccacggccaactacgacaccgacgaccggtttggcttctgccccagcgagagactctacacccaggacggcaatgctgatgggaaaccctgccagtttccattcatcttccaaggccaatcctactccgcctgcaccacggacggtcgctccgacggctaccgctggtgcgccaccaccgccaactacgaccgggacaagctcttcggcttctgcccgacccgagctgactcgacggtgatggggggcaactcggcgggggagctgtgcgtcttccccttcactttcctgggtaaggagtactcgacctgtaccagcgagggccgcggagatgggcgcctctggtgcgctaccacctcgaactttgacagcgacaagaagtggggcttctgcccggaccaaggatacagtttgttcctcgtggcggcgcatgagttcggccacgcgctgggcttagatcattcctcagtgccggaggcgctcatgtaccctatgtaccgcttcactgaggggccccccttgcataaggacgacgtgaatggcatccggcacctctatggtcctcgccctgaacctgattacaaggatgacgacgataagtgataa

SEQ ID NO: 649 - DNA, 30 bp, Artificial Sequence
  NFAT response element
ggaggaaaaactgtttcatacagaaggcgt

SEQ ID NO: 650 - DNA, 90 bp, Artificial Sequence
  NFAT response element repeats
ggaggaaaaactgtttcatacagaaggcgtggaggaaaaactgtttcatacagaaggcgtggaggaaaaactgtttcatacagaaggcgt

SEQ ID NO: 651 - DNA, 61 bp, Artificial Sequence
  CMV minimal promoter
aggtaggcgtgtacggtgggaggtctatataagcagagctggtttagtgaaccgtcagatc

SEQ ID NO: 652 - DNA, 2326 bp, Artificial Sequence
  NFATREmCMV-MMP9
ggaggaaaaactgtttcatacagaaggcgtggaggaaaaactgtttcatacagaaggcgtggaggaaaaactgtttcatacagaaggcgtagatctagactcaggtaggcgtgtacggtgggaggtctatataagcagagctggtttagtgaaccgtcagatctctagagccaccatgagcctctggcagcccctggtcctggtgctcctggtgctgggctgctgctttgctgcccccagacagcgccagtccacccttgtgctcttccctggagacctgagaaccaatctcaccgacaggcagctggcagaggaatacctgtaccgctatggttacactcgggtggcagagatgcgtggagagtcgaaatctctggggcctgcgctgctgcttctccagaagcaactgtccctgcccgagaccggtgagctggatagcgccacgctgaaggccatgcgaaccccacggtgcggggtcccagacctgggcagattccaaacctttgagggcgacctcaagtggcaccaccacaacatcacctattggatccaaaactactcggaagacttgccgcgggcggtgattgacgacgcctttgcccgcgccttcgcactgtggagcgcggtgacgccgctcaccttcactcgcgtgtacagccgggacgcagacatcgtcatccagtttggtgtcgcggagcacggagacgggtatcccttcgacgggaaggacgggctcctggcacacgcctttcctcctggccccggcattcagggagacgcccatttcgacgatgacgagttgtggtccctgggcaagggcgtcgtggttccaactcggtttggaaacgcagatggcgcggcctgccacttccccttcatcttcgagggccgctcctactctgcctgcaccaccgacggtcgctccgacggcttgccctggtgcagtaccacggccaactacgacaccgacgaccggtttggcttctgccccagcgagagactctacacccaggacggcaatgctgatgggaaaccctgccagtttccattcatcttccaaggccaatcctactccgcctgcaccacggacggtcgctccgacggctaccgctggtgcgccaccaccgccaactacgaccgggacaagctcttcggcttctgcccgacccgagctgactcgacggtgatggggggcaactcggcgggggagctgtgcgtcttccccttcactttcctgggtaaggagtactcgacctgtaccagcgagggccgcggagatgggcgcctctggtgcgctaccacctcgaactttgacagcgacaagaagtggggcttctgcccggaccaaggatacagtttgttcctcgtggcggcgcatgagttcggccacgcgctgggcttagatcattcctcagtgccggaggcgctcatgtaccctatgtaccgcttcactgaggggccccccttgcataaggacgacgtgaatggcatccggcacctctatggtcctcgccctgaacctgagccacggcctccaaccaccaccacaccgcagcccacggctcccccgacggtctgccccaccggaccccccactgtccacccctcagagcgccccacagctggccccacaggtcccccctcagctggccccacaggtccccccactgctggcccttctacggccactactgtgcctttgagtccggtggacgatgcctgcaacgtgaacatcttcgacgccatcgcggagattgggaaccagctgtatttgttcaaggatgggaagtactggcgattctctgagggcagggggagccggccgcagggccccttccttatcgccgacaagtggcccgcgctgccccgcaagctggactcggtctttgaggagcggctctccaagaagcttttcttcttctctgggcgccaggtgtgggtgtacacaggcgcgtcggtgctgggcccgaggcgtctggacaagctgggcctgggagccgacgtggcccaggtgaccggggccctccggagtggcagggggaagatgctgctgttcagcgggcggcgcctctggaggttcgacgtgaaggcgcagatggtggatccccggagcgccagcgaggtggaccggatgttccccggggtgcctttggacacgcacgacgtcttccagtaccgagagaaagcctatttctgccaggaccgcttctactggcgcgtgagttcccggagtgagttgaaccaggtggaccaagtgggctacgtgacctatgacatcctgcagtgccctgaggacgattacaaggatgacgacgataagtgataa

SEQ ID NO: 653 - DNA, 1237 bp, Artificial Sequence
  NFATREmCMV-MMP9cat
ggaggaaaaactgtttcatacagaaggcgtggaggaaaaactgtttcatacagaaggcgtggaggaaaaactgtttcatacagaaggcgtagatctagactcaggtaggcgtgtacggtgggaggtctatataagcagagctggtttagtgaaccgtcagatctctagagccaccatgttccaaacctttgagggcgacctcaagtggcaccaccacaacatcacctattggatccaaaactactcggaagacttgccgcgggcggtgattgacgacgcctttgcccgcgccttcgcactgtggagcgcggtgacgccgctcaccttcactcgcgtgtacagccgggacgcagacatcgtcatccagtttggtgtcgcggagcacggagacgggtatcccttcgacgggaaggacgggctcctggcacacgcctttcctcctggccccggcattcagggagacgcccatttcgacgatgacgagttgtggtccctgggcaagggcgtcgtggttccaactcggtttggaaacgcagatggcgcggcctgccacttccccttcatcttcgagggccgctcctactctgcctgcaccaccgacggtcgctccgacggcttgccctggtgcagtaccacggccaactacgacaccgacgaccggtttggcttctgccccagcgagagactctacacccaggacggcaatgctgatgggaaaccctgccagtttccattcatcttccaaggccaatcctactccgcctgcaccacggacggtcgctccgacggctaccgctggtgcgccaccaccgccaactacgaccgggacaagctcttcggcttctgcccgacccgagctgactcgacggtgatggggggcaactcggcgggggagctgtgcgtcttccccttcactttcctgggtaaggagtactcgacctgtaccagcgagggccgcggagatgggcgcctctggtgcgctaccacctcgaactttgacagcgacaagaagtggggcttctgcccggaccaaggatacagtttgttcctcgtggcggcgcatgagttcggccacgcgctgggcttagatcattcctcagtgccggaggcgctcatgtaccctatgtaccgcttcactgaggggccccccttgcataaggacgacgtgaatggcatccggcacctctatggtcctcgccctgaacctgattacaaggatgacgacgataagtgataa

SEQ ID NO: 654 - DNA, 747 bp, Artificial Sequence; identical to SEQ ID NO: 238
  C2 scFv

SEQ ID NO: 655 - protein, 249 aa, Artificial Sequence; identical to SEQ ID NO: 239
  C2 scFv

SEQ ID NO: 656 - DNA, 72 bp, Artificial Sequence
  CD8 transmembrane domain
atctacatctgggcgcccttggccgggacttgtggggtccttctcctgtcactggttatcaccctttactgc

SEQ ID NO: 657 - protein, 24 aa, Artificial Sequence
  CD8 transmembrane domain
IYIWAPLAGTCGVLLLSLVITLYC

SEQ ID NO: 658 - DNA, 126 bp, Artificial Sequence
  4-1BB domain
aaacggggcagaaagaaactcctgtatatattcaaacaaccatttatgagaccagtacaaactactcaagaggaagatggctgtagctgccgatttccagaagaagaagaaggaggatgtgaactg

SEQ ID NO: 659 - protein, 42 aa, Artificial Sequence; identical to SEQ ID NO: 380
  4-1BB domain

SEQ ID NO: 660 - DNA, 336 bp, Artificial Sequence
  CD3zeta domain
agagtgaagttcagcaggagcgcagacgcccccgcgtacaagcagggccagaaccagctctataacgagctcaatctaggacgaagagaggagtacgatgttttggacaagagacgtggccgggaccctgagatggggggaaagccgagaaggaagaaccctcaggaaggcctgtacaatgaactgcagaaagataagatggcggaggcctacagtgagattgggatgaaaggcgagcgccggaggggcaaggggcacgatggcctttaccagggtctcagtacagccaccaaggacacctacgacgcccttcacatgcaggccctgccccctcgc

SEQ ID NO: 661 - protein, 112 aa, Artificial Sequence; identical to SEQ ID NO: 374
  CD3zeta domain

SEQ ID NO: 662 - DNA, 696 bp, Artificial Sequence
  Human IgG1 Fc linker
gagcccaaatcttgtgacaaaactcacacatgcccaccgtgcccagcacctgaactcctggggggaccgtcagtcttcctcttccccccaaaacccaaggacaccctcatgatctcccggacccctgaggtcacatgcgtggtggtggacgtgagccacgaagaccctgaggtcaagttcaactggtacgtggacggcgtggaggtgcataatgccaagacaaagccgcgggaggagcagtacaacagcacgtaccgtgtggtcagcgtcctcaccgtcctgcaccaggactggctgaatggcaaggagtacaagtgcaaggtctccaacaaagccctcccagcccccatcgagaaaaccatctccaaagccaaagggcagccccgagaaccacaggtgtacaccctgcccccatcccgggaggagatgaccaagaaccaggtcagcctgacctgcctggtcaaaggcttctatcccagcgacatcgccgtggagtgggagagcaatgggcagccggagaacaactacaagaccacgcctcccgtgctggactccgacggctccttcttcctctacagcaagctcaccgtggacaagagcaggtggcagcaggggaacgtcttctcatgctccgtgatgcatgaggctctgcacaaccactacacgcagaagagcctctccctgtctccgggtaaa

SEQ ID NO: 663 - protein, 232 aa, Artificial Sequence; identical to SEQ ID NO: 273
  Human IgG1 Fc linker

SEQ ID NO: 664 - DNA, 1983 bp, Artificial Sequence
  C2 CAR FC linker
gaggtgcagctggtggagtctgggggaggcctggtcaagcctggggggtccctgagactctcctgtgcagcctctggattcaccttcagtggctatgccatgagctgggtccgccaggctccagggaaggggctggagtgggtctcaaccattagtagtggcggaacctacatatactaccccgactcagtgaagggccgattcaccatctccagagacaacgccaagaactcactgtatctgcaaatgaacagcctgagagccgaggacacggccgtgtattactgtgcgagacttgggggggataattactacgaatacttcgatgtctggggcaaagggaccacggtcaccgtctcctccggcggtggcggatccggcggtggcggatccggcggtggcggatccgacattgtgctgacccagtctccagcctccttggccgtgtctccaggacagagggccaccatcacctgcagagccagtaagagtgtcagtaccagcggatactcctacatgcactggtatcagcagaaaccaggacaacctcctaaactcctgatttacctggcatccaatctggagagcggggtcccagccaggttcagcggcagtgggtctgggaccgatttcaccctcacaattaatcctgtggaagctaatgatactgcaaattattactgtcagcacagtagggagctgcctttcacattcggcggagggaccaaggtggagatcaaacgaactgagcccaaatcttgtgacaaaactcacacatgcccaccgtgcccagcacctgaactcctggggggaccgtcagtcttcctcttccccccaaaacccaaggacaccctcatgatctcccggacccctgaggtcacatgcgtggtggtggacgtgagccacgaagaccctgaggtcaagttcaactggtacgtggacggcgtggaggtgcataatgccaagacaaagccgcgggaggagcagtacaacagcacgtaccgtgtggtcagcgtcctcaccgtcctgcaccaggactggctgaatggcaaggagtacaagtgcaaggtctccaacaaagccctcccagcccccatcgagaaaaccatctccaaagccaaagggcagccccgagaaccacaggtgtacaccctgcccccatcccgggaggagatgaccaagaaccaggtcagcctgacctgcctggtcaaaggcttctatcccagcgacatcgccgtggagtgggagagcaatgggcagccggagaacaactacaagaccacgcctcccgtgctggactccgacggctccttcttcctctacagcaagctcaccgtggacaagagcaggtggcagcaggggaacgtcttctcatgctccgtgatgcatgaggctctgcacaaccactacacgcagaagagcctctccctgtctccgggtaaaatctacatctgggcgcccttggccgggacttgtggggtccttctcctgtcactggttatcaccctttactgcaaacggggcagaaagaaactcctgtatatattcaaacaaccatttatgagaccagtacaaactactcaagaggaagatggctgtagctgccgatttccagaagaagaagaaggaggatgtgaactgagagtgaagttcagcaggagcgcagacgcccccgcgtacaagcagggccagaaccagctctataacgagctcaatctaggacgaagagaggagtacgatgttttggacaagagacgtggccgggaccctgagatggggggaaagccgagaaggaagaaccctcaggaaggcctgtacaatgaactgcagaaagataagatggcggaggcctacagtgagattgggatgaaaggcgagcgccggaggggcaaggggcacgatggcctttaccagggtctcagtacagccaccaaggacacctacgacgcccttcacatgcaggccctgccccctcgctgataa

SEQ ID NO: 665 - protein, 659 aa, Artificial Sequence
  C2 CAR FC linker
EVQLVESGGGLVKPGGSLRLSCAASGFTFSGYAMSWVRQAPGKGLEWVSTISSGGTYIYYPDSVKGRFTISRDNAKNSLYLQMNSLRAEDTAVYYCARLGGDNYYEYFDVWGKGTTVTVSSGGGGSGGGGSGGGGSDIVLTQSPASLAVSPGQRATITCRASKSVSTSGYSYMHWYQQKPGQPPKLLIYLASNLESGVPARFSGSGSGTDFTLTINPVEANDTANYYCQHSRELPFTFGGGTKVEIKRTEPKSCDKTHTCPPCPAPELLGGPSVFLFPPKPKDTLMISRTPEVTCVVVDVSHEDPEVKFNWYVDGVEVHNAKTKPREEQYNSTYRVVSVLTVLHQDWLNGKEYKCKVSNKALPAPIEKTISKAKGQPREPQVYTLPPSREEMTKNQVSLTCLVKGFYPSDIAVEWESNGQPENNYKTTPPVLDSDGSFFLYSKLTVDKSRWQQGNVFSCSVMHEALHNHYTQKSLSLSPGKIYIWAPLAGTCGVLLLSLVITLYCKRGRKKLLYIFKQPFMRPVQTTQEEDGCSCRFPEEEEGGCELRVKFSRSADAPAYKQGQNQLYNELNLGRREEYDVLDKRRGRDPEMGGKPRRKNPQEGLYNELQKDKMAEAYSEIGMKGERRRGKGHDGLYQGLSTATKDTYDALHMQALPPR

SEQ ID NO: 666 - DNA, 870 bp, Artificial Sequence
  IgD/Fc linker
gagtctccaaaggcacaggcctcctcagtgcccactgcacaaccccaagcagagggcagcctcgccaaggcaaccacagccccagccaccacccgtaacacaggaagaggcggcgaagagaagaaaaaggagaaggagaaagaggaacaagaagagagagagacaaagacaccagagcccaaatcttgtgacaaaactcacacatgcccaccgtgcccagcacctgaactcctggggggaccgtcagtcttcctcttccccccaaaacccaaggacaccctcatgatctcccggacccctgaggtcacatgcgtggtggtggacgtgagccacgaagaccctgaggtcaagttcaactggtacgtggacggcgtggaggtgcataatgccaagacaaagccgcgggaggagcagtacaacagcacgtaccgtgtggtcagcgtcctcaccgtcctgcaccaggactggctgaatggcaaggagtacaagtgcaaggtctccaacaaagccctcccagcccccatcgagaaaaccatctccaaagccaaagggcagccccgagaaccacaggtgtacaccctgcccccatcccgggaggagatgaccaagaaccaggtcagcctgacctgcctggtcaaaggcttctatcccagcgacatcgccgtggagtgggagagcaatgggcagccggagaacaactacaagaccacgcctcccgtgctggactccgacggctccttcttcctctacagcaagctcaccgtggacaagagcaggtggcagcaggggaacgtcttctcatgctccgtgatgcatgaggctctgcacaaccactacacgcagaagagcctctccctgtctccgggtaaa

SEQ ID NO: 667 - protein, 290 aa, Artificial Sequence
  IgD/Fc linker
ESPKAQASSVPTAQPQAEGSLAKATTAPATTRNTGRGGEEKKKEKEKEEQEERETKTPEPKSCDKTHTCPPCPAPELLGGPSVFLFPPKPKDTLMISRTPEVTCVVVDVSHEDPEVKFNWYVDGVEVHNAKTKPREEQYNSTYRVVSVLTVLHQDWLNGKEYKCKVSNKALPAPIEKTISKAKGQPREPQVYTLPPSREEMTKNQVSLTCLVKGFYPSDIAVEWESNGQPENNYKTTPPVLDSDGSFFLYSKLTVDKSRWQQGNVFSCSVMHEALHNHYTQKSLSLSPGK

SEQ ID NO: 668 - DNA, 2157 bp, Artificial Sequence
  C2 CAR IgD/FC linker
gaggtgcagctggtggagtctgggggaggcctggtcaagcctggggggtccctgagactctcctgtgcagcctctggattcaccttcagtggctatgccatgagctgggtccgccaggctccagggaaggggctggagtgggtctcaaccattagtagtggcggaacctacatatactaccccgactcagtgaagggccgattcaccatctccagagacaacgccaagaactcactgtatctgcaaatgaacagcctgagagccgaggacacggccgtgtattactgtgcgagacttgggggggataattactacgaatacttcgatgtctggggcaaagggaccacggtcaccgtctcctccggcggtggcggatccggcggtggcggatccggcggtggcggatccgacattgtgctgacccagtctccagcctccttggccgtgtctccaggacagagggccaccatcacctgcagagccagtaagagtgtcagtaccagcggatactcctacatgcactggtatcagcagaaaccaggacaacctcctaaactcctgatttacctggcatccaatctggagagcggggtcccagccaggttcagcggcagtgggtctgggaccgatttcaccctcacaattaatcctgtggaagctaatgatactgcaaattattactgtcagcacagtagggagctgcctttcacattcggcggagggaccaaggtggagatcaaacgaactgagtctccaaaggcacaggcctcctcagtgcccactgcacaaccccaagcagagggcagcctcgccaaggcaaccacagccccagccaccacccgtaacacaggaagaggcggcgaagagaagaaaaaggagaaggagaaagaggaacaagaagagagagagacaaagacaccagagcccaaatcttgtgacaaaactcacacatgcccaccgtgcccagcacctgaactcctggggggaccgtcagtcttcctcttccccccaaaacccaaggacaccctcatgatctcccggacccctgaggtcacatgcgtggtggtggacgtgagccacgaagaccctgaggtcaagttcaactggtacgtggacggcgtggaggtgcataatgccaagacaaagccgcgggaggagcagtacaacagcacgtaccgtgtggtcagcgtcctcaccgtcctgcaccaggactggctgaatggcaaggagtacaagtgcaaggtctccaacaaagccctcccagcccccatcgagaaaaccatctccaaagccaaagggcagccccgagaaccacaggtgtacaccctgcccccatcccgggaggagatgaccaagaaccaggtcagcctgacctgcctggtcaaaggcttctatcccagcgacatcgccgtggagtgggagagcaatgggcagccggagaacaactacaagaccacgcctcccgtgctggactccgacggctccttcttcctctacagcaagctcaccgtggacaagagcaggtggcagcaggggaacgtcttctcatgctccgtgatgcatgaggctctgcacaaccactacacgcagaagagcctctccctgtctccgggtaaaatctacatctgggcgcccttggccgggacttgtggggtccttctcctgtcactggttatcaccctttactgcaaacggggcagaaagaaactcctgtatatattcaaacaaccatttatgagaccagtacaaactactcaagaggaagatggctgtagctgccgatttccagaagaagaagaaggaggatgtgaactgagagtgaagttcagcaggagcgcagacgcccccgcgtacaagcagggccagaaccagctctataacgagctcaatctaggacgaagagaggagtacgatgttttggacaagagacgtggccgggaccctgagatggggggaaagccgagaaggaagaaccctcaggaaggcctgtacaatgaactgcagaaagataagatggcggaggcctacagtgagattgggatgaaaggcgagcgccggaggggcaaggggcacgatggcctttaccagggtctcagtacagccaccaaggacacctacgacgcccttcacatgcaggccctgccccctcgctgataa

SEQ ID NO: 669 - protein, 717 aa, Artificial Sequence
  C2 CAR IgD/FC linker
EVQLVESGGGLVKPGGSLRLSCAASGFTFSGYAMSWVRQAPGKGLEWVSTISSGGTYIYYPDSVKGRFTISRDNAKNSLYLQMNSLRAEDTAVYYCARLGGDNYYEYFDVWGKGTTVTVSSGGGGSGGGGSGGGGSDIVLTQSPASLAVSPGQRATITCRASKSVSTSGYSYMHWYQQKPGQPPKLLIYLASNLESGVPARFSGSGSGTDFTLTINPVEANDTANYYCQHSRELPFTFGGGTKVEIKRTESPKAQASSVPTAQPQAEGSLAKATTAPATTRNTGRGGEEKKKEKEKEEQEERETKTPEPKSCDKTHTCPPCPAPELLGGPSVFLFPPKPKDTLMISRTPEVTCVVVDVSHEDPEVKFNWYVDGVEVHNAKTKPREEQYNSTYRVVSVLTVLHQDWLNGKEYKCKVSNKALPAPIEKTISKAKGQPREPQVYTLPPSREEMTKNQVSLTCLVKGFYPSDIAVEWESNGQPENNYKTTPPVLDSDGSFFLYSKLTVDKSRWQQGNVFSCSVMHEALHNHYTQKSLSLSPGKIYIWAPLAGTCGVLLLSLVITLYCKRGRKKLLYIFKQPFMRPVQTTQEEDGCSCRFPEEEEGGCELRVKFSRSADAPAYKQGQNQLYNELNLGRREEYDVLDKRRGRDPEMGGKPRRKNPQEGLYNELQKDKMAEAYSEIGMKGERRRGKGHDGLYQGLSTATKDTYDALHMQALPPR

SEQ ID NO: 670 - DNA, 651 bp, Artificial Sequence
  Fc hingeless Y407R linker
gcacctgaactcctggggggaccgtcagtcttcctcttccccccaaaacccaaggacaccctcatgatctcccggacccctgaggtcacatgcgtggtggtggacgtgagccacgaagaccctgaggtcaagttcaactggtacgtggacggcgtggaggtgcataatgccaagacaaagccgcgggaggagcagtacaacagcacgtaccgtgtggtcagcgtcctcaccgtcctgcaccaggactggctgaatggcaaggagtacaagtgcaaggtctccaacaaagccctcccagcccccatcgagaaaaccatctccaaagccaaagggcagccccgagaaccacaggtgtacaccctgcccccatcccgggaggagatgaccaagaaccaggtcagcctgacctgcctggtcaaaggcttctatcccagcgacatcgccgtggagtgggagagcaatgggcagccggagaacaactacaagaccacgcctcccgtgctggactccgacggctccttcttcctcaggagcaagctcaccgtggacaagagcaggtggcagcaggggaacgtcttctcatgctccgtgatgcatgaggctctgcacaaccactacacgcagaagagcctctccctgtctccgggtaaa

SEQ ID NO: 671 - protein, 217 aa, Artificial Sequence
  Fc hingeless Y407R linker
APELLGGPSVFLFPPKPKDTLMISRTPEVTCVVVDVSHEDPEVKFNWYVDGVEVHNAKTKPREEQYNSTYRVVSVLTVLHQDWLNGKEYKCKVSNKALPAPIEKTISKAKGQPREPQVYTLPPSREEMTKNQVSLTCLVKGFYPSDIAVEWESNGQPENNYKTTPPVLDSDGSFFLRSKLTVDKSRWQQGNVFSCSVMHEALHNHYTQKSLSLSPGK

SEQ ID NO: 672 - DNA, 1938 bp, Artificial Sequence
  C2 CAR FCHingeless/Y407R linker
gaggtgcagctggtggagtctgggggaggcctggtcaagcctggggggtccctgagactctcctgtgcagcctctggattcaccttcagtggctatgccatgagctgggtccgccaggctccagggaaggggctggagtgggtctcaaccattagtagtggcggaacctacatatactaccccgactcagtgaagggccgattcaccatctccagagacaacgccaagaactcactgtatctgcaaatgaacagcctgagagccgaggacacggccgtgtattactgtgcgagacttgggggggataattactacgaatacttcgatgtctggggcaaagggaccacggtcaccgtctcctccggcggtggcggatccggcggtggcggatccggcggtggcggatccgacattgtgctgacccagtctccagcctccttggccgtgtctccaggacagagggccaccatcacctgcagagccagtaagagtgtcagtaccagcggatactcctacatgcactggtatcagcagaaaccaggacaacctcctaaactcctgatttacctggcatccaatctggagagcggggtcccagccaggttcagcggcagtgggtctgggaccgatttcaccctcacaattaatcctgtggaagctaatgatactgcaaattattactgtcagcacagtagggagctgcctttcacattcggcggagggaccaaggtggagatcaaacgaactgcacctgaactcctggggggaccgtcagtcttcctcttccccccaaaacccaaggacaccctcatgatctcccggacccctgaggtcacatgcgtggtggtggacgtgagccacgaagaccctgaggtcaagttcaactggtacgtggacggcgtggaggtgcataatgccaagacaaagccgcgggaggagcagtacaacagcacgtaccgtgtggtcagcgtcctcaccgtcctgcaccaggactggctgaatggcaaggagtacaagtgcaaggtctccaacaaagccctcccagcccccatcgagaaaaccatctccaaagccaaagggcagccccgagaaccacaggtgtacaccctgcccccatcccgggaggagatgaccaagaaccaggtcagcctgacctgcctggtcaaaggcttctatcccagcgacatcgccgtggagtgggagagcaatgggcagccggagaacaactacaagaccacgcctcccgtgctggactccgacggctccttcttcctcaggagcaagctcaccgtggacaagagcaggtggcagcaggggaacgtcttctcatgctccgtgatgcatgaggctctgcacaaccactacacgcagaagagcctctccctgtctccgggtaaaatctacatctgggcgcccttggccgggacttgtggggtccttctcctgtcactggttatcaccctttactgcaaacggggcagaaagaaactcctgtatatattcaaacaaccatttatgagaccagtacaaactactcaagaggaagatggctgtagctgccgatttccagaagaagaagaaggaggatgtgaactgagagtgaagttcagcaggagcgcagacgcccccgcgtacaagcagggccagaaccagctctataacgagctcaatctaggacgaagagaggagtacgatgttttggacaagagacgtggccgggaccctgagatggggggaaagccgagaaggaagaaccctcaggaaggcctgtacaatgaactgcagaaagataagatggcggaggcctacagtgagattgggatgaaaggcgagcgccggaggggcaaggggcacgatggcctttaccagggtctcagtacagccaccaaggacacctacgacgcccttcacatgcaggccctgccccctcgctgataa

SEQ ID NO: 673 - protein, 644 aa, Artificial Sequence
  C2 CAR FCHingeless/Y407R linker
EVQLVESGGGLVKPGGSLRLSCAASGFTFSGYAMSWVRQAPGKGLEWVSTISSGGTYIYYPDSVKGRFTISRDNAKNSLYLQMNSLRAEDTAVYYCARLGGDNYYEYFDVWGKGTTVTVSSGGGGSGGGGSGGGGSDIVLTQSPASLAVSPGQRATITCRASKSVSTSGYSYMHWYQQKPGQPPKLLIYLASNLESGVPARFSGSGSGTDFTLTINPVEANDTANYYCQHSRELPFTFGGGTKVEIKRTAPELLGGPSVFLFPPKPKDTLMISRTPEVTCVVVDVSHEDPEVKFNWYVDGVEVHNAKTKPREEQYNSTYRVVSVLTVLHQDWLNGKEYKCKVSNKALPAPIEKTISKAKGQPREPQVYTLPPSREEMTKNQVSLTCLVKGFYPSDIAVEWESNGQPENNYKTTPPVLDSDGSFFLRSKLTVDKSRWQQGNVFSCSVMHEALHNHYTQKSLSLSPGKIYIWAPLAGTCGVLLLSLVITLYCKRGRKKLLYIFKQPFMRPVQTTQEEDGCSCRFPEEEEGGCELRVKFSRSADAPAYKQGQNQLYNELNLGRREEYDVLDKRRGRDPEMGGKPRRKNPQEGLYNELQKDKMAEAYSEIGMKGERRRGKGHDGLYQGLSTATKDTYDALHMQALPPR

SEQ ID NO: 674 - DNA, 825 bp, Artificial Sequence
  IgD/FCHingeless/Y407R linker
gagtctccaaaggcacaggcctcctcagtgcccactgcacaaccccaagcagagggcagcctcgccaaggcaaccacagccccagccaccacccgtaacacaggaagaggcggcgaagagaagaaaaaggagaaggagaaagaggaacaagaagagagagagacaaagacaccagcacctgaactcctggggggaccgtcagtcttcctcttccccccaaaacccaaggacaccctcatgatctcccggacccctgaggtcacatgcgtggtggtggacgtgagccacgaagaccctgaggtcaagttcaactggtacgtggacggcgtggaggtgcataatgccaagacaaagccgcgggaggagcagtacaacagcacgtaccgtgtggtcagcgtcctcaccgtcctgcaccaggactggctgaatggcaaggagtacaagtgcaaggtctccaacaaagccctcccagcccccatcgagaaaaccatctccaaagccaaagggcagccccgagaaccacaggtgtacaccctgcccccatcccgggaggagatgaccaagaaccaggtcagcctgacctgcctggtcaaaggcttctatcccagcgacatcgccgtggagtgggagagcaatgggcagccggagaacaactacaagaccacgcctcccgtgctggactccgacggctccttcttcctcaggagcaagctcaccgtggacaagagcaggtggcagcaggggaacgtcttctcatgctccgtgatgcatgaggctctgcacaaccactacacgcagaagagcctctccctgtctccgggtaaa

SEQ ID NO: 675 - protein, 275 aa, Artificial Sequence
  IgD/FCHingeless/Y407R linker
ESPKAQASSVPTAQPQAEGSLAKATTAPATTRNTGRGGEEKKKEKEKEEQEERETKTPAPELLGGPSVFLFPPKPKDTLMISRTPEVTCVVVDVSHEDPEVKFNWYVDGVEVHNAKTKPREEQYNSTYRVVSVLTVLHQDWLNGKEYKCKVSNKALPAPIEKTISKAKGQPREPQVYTLPPSREEMTKNQVSLTCLVKGFYPSDIAVEWESNGQPENNYKTTPPVLDSDGSFFLRSKLTVDKSRWQQGNVFSCSVMHEALHNHYTQKSLSLSPGK

SEQ ID NO: 676 - DNA, 2045 bp, Artificial Sequence
  C2 CAR IgD/FCHingeless/Y407R linker
cagcctctggattcaccttcagtggctatgccatgagctgggtccgccaggctccagggaaggggctggagtgggtctcaaccattagtagtggcggaacctacatatactaccccgactcagtgaagggccgattcaccatctccagagacaacgccaagaactcactgtatctgcaaatgaacagcctgagagccgaggacacggccgtgtattactgtgcgagacttgggggggataattactacgaatacttcgatgtctggggcaaagggaccacggtcaccgtctcctccggcggtggcggatccggcggtggcggatccggcggtggcggatccgacattgtgctgacccagtctccagcctccttggccgtgtctccaggacagagggccaccatcacctgcagagccagtaagagtgtcagtaccagcggatactcctacatgcactggtatcagcagaaaccaggacaacctcctaaactcctgatttacctggcatccaatctggagagcggggtcccagccaggttcagcggcagtgggtctgggaccgatttcaccctcacaattaatcctgtggaagctaatgatactgcaaattattactgtcagcacagtagggagctgcctttcacattcggcggagggaccaaggtggagatcaaacgaactgagtctccaaaggcacaggcctcctcagtgcccactgcacaaccccaagcagagggcagcctcgccaaggcaaccacagccccagccaccacccgtaacacaggaagaggcggcgaagagaagaaaaaggagaaggagaaagaggaacaagaagagagagagacaaagacaccagcacctgaactcctggggggaccgtcagtcttcctcttccccccaaaacccaaggacaccctcatgatctcccggacccctgaggtcacatgcgtggtggtggacgtgagccacgaagaccctgaggtcaagttcaactggtacgtggacggcgtggaggtgcataatgccaagacaaagccgcgggaggagcagtacaacagcacgtaccgtgtggtcagcgtcctcaccgtcctgcaccaggactggctgaatggcaaggagtacaagtgcaaggtctccaacaaagccctcccagcccccatcgagaaaaccatctccaaagccaaagggcagccccgagaaccacaggtgtacaccctgcccccatcccgggaggagatgaccaagaaccaggtcagcctgacctgcctggtcaaaggcttctatcccagcgacatcgccgtggagtgggagagcaatgggcagccggagaacaactacaagaccacgcctcccgtgctggactccgacggctccttcttcctcaggagcaagctcaccgtggacaagagcaggtggcagcaggggaacgtcttctcatgctccgtgatgcatgaggctctgcacaaccactacacgcagaagagcctctccctgtctccgggtaaaatctacatctgggcgcccttggccgggacttgtggggtccttctcctgtcactggttatcaccctttactgcaaacggggcagaaagaaactcctgtatatattcaaacaaccatttatgagaccagtacaaactactcaagaggaagatggctgtagctgccgatttccagaagaagaagaaggaggatgtgaactgagagtgaagttcagcaggagcgcagacgcccccgcgtacaagcagggccagaaccagctctataacgagctcaatctaggacgaagagaggagtacgatgttttggacaagagacgtggccgggaccctgagatggggggaaagccgagaaggaagaaccctcaggaaggcctgtacaatgaactgcagaaagataagatggcggaggcctacagtgagattgggatgaaaggcgagcgccggaggggcaaggggcacgatggcctttaccagggtctcagtacagccaccaaggacacctacgacgcccttcacatgcaggccctgccccctcgctgataa

SEQ ID NO: 677 - protein, 702 aa, Artificial Sequence
  C2 CAR IgD/FCHingeless/Y407R linker
EVQLVESGGGLVKPGGSLRLSCAASGFTFSGYAMSWVRQAPGKGLEWVSTISSGGTYIYYPDSVKGRFTISRDNAKNSLYLQMNSLRAEDTAVYYCARLGGDNYYEYFDVWGKGTTVTVSSGGGGSGGGGSGGGGSDIVLTQSPASLAVSPGQRATITCRASKSVSTSGYSYMHWYQQKPGQPPKLLIYLASNLESGVPARFSGSGSGTDFTLTINPVEANDTANYYCQHSRELPFTFGGGTKVEIKRTESPKAQASSVPTAQPQAEGSLAKATTAPATTRNTGRGGEEKKKEKEKEEQEERETKTPAPELLGGPSVFLFPPKPKDTLMISRTPEVTCVVVDVSHEDPEVKFNWYVDGVEVHNAKTKPREEQYNSTYRVVSVLTVLHQDWLNGKEYKCKVSNKALPAPIEKTISKAKGQPREPQVYTLPPSREEMTKNQVSLTCLVKGFYPSDIAVEWESNGQPENNYKTTPPVLDSDGSFFLRSKLTVDKSRWQQGNVFSCSVMHEALHNHYTQKSLSLSPGKIYIWAPLAGTCGVLLLSLVITLYCKRGRKKLLYIFKQPFMRPVQTTQEEDGCSCRFPEEEEGGCELRVKFSRSADAPAYKQGQNQLYNELNLGRREEYDVLDKRRGRDPEMGGKPRRKNPQEGLYNELQKDKMAEAYSEIGMKGERRRGKGHDGLYQGLSTATKDTYDALHMQALPPR

SEQ ID NO: 678 - DNA, 174 bp, Artificial Sequence; identical to SEQ ID NO: 357
  IgD linker

SEQ ID NO: 679 - protein, 58 aa, Artificial Sequence; identical to SEQ ID NO: 358
  IgD linker

SEQ ID NO: 680 - DNA, 1461 bp, Artificial Sequence
  C2 CAR IgD linker
gaggtgcagctggtggagtctgggggaggcctggtcaagcctggggggtccctgagactctcctgtgcagcctctggattcaccttcagtggctatgccatgagctgggtccgccaggctccagggaaggggctggagtgggtctcaaccattagtagtggcggaacctacatatactaccccgactcagtgaagggccgattcaccatctccagagacaacgccaagaactcactgtatctgcaaatgaacagcctgagagccgaggacacggccgtgtattactgtgcgagacttgggggggataattactacgaatacttcgatgtctggggcaaagggaccacggtcaccgtctcctccggcggtggcggatccggcggtggcggatccggcggtggcggatccgacattgtgctgacccagtctccagcctccttggccgtgtctccaggacagagggccaccatcacctgcagagccagtaagagtgtcagtaccagcggatactcctacatgcactggtatcagcagaaaccaggacaacctcctaaactcctgatttacctggcatccaatctggagagcggggtcccagccaggttcagcggcagtgggtctgggaccgatttcaccctcacaattaatcctgtggaagctaatgatactgcaaattattactgtcagcacagtagggagctgcctttcacattcggcggagggaccaaggtggagatcaaacgaactgagtctccaaaggcacaggcctcctcagtgcccactgcacaaccccaagcagagggcagcctcgccaaggcaaccacagccccagccaccacccgtaacacaggaagaggcggcgaagagaagaaaaaggagaaggagaaagaggaacaagaagagagagagacaaagacaccaatctacatctgggcgcccttggccgggacttgtggggtccttctcctgtcactggttatcaccctttactgcaaacggggcagaaagaaactcctgtatatattcaaacaaccatttatgagaccagtacaaactactcaagaggaagatggctgtagctgccgatttccagaagaagaagaaggaggatgtgaactgagagtgaagttcagcaggagcgcagacgcccccgcgtacaagcagggccagaaccagctctataacgagctcaatctaggacgaagagaggagtacgatgttttggacaagagacgtggccgggaccctgagatggggggaaagccgagaaggaagaaccctcaggaaggcctgtacaatgaactgcagaaagataagatggcggaggcctacagtgagattgggatgaaaggcgagcgccggaggggcaaggggcacgatggcctttaccagggtctcagtacagccaccaaggacacctacgacgcccttcacatgcaggccctgccccctcgctgataa

SEQ ID NO: 681 - protein, 485 aa, Artificial Sequence
  C2 CAR IgD linker
EVQLVESGGGLVKPGGSLRLSCAASGFTFSGYAMSWVRQAPGKGLEWVSTISSGGTYIYYPDSVKGRFTISRDNAKNSLYLQMNSLRAEDTAVYYCARLGGDNYYEYFDVWGKGTTVTVSSGGGGSGGGGSGGGGSDIVLTQSPASLAVSPGQRATITCRASKSVSTSGYSYMHWYQQKPGQPPKLLIYLASNLESGVPARFSGSGSGTDFTLTINPVEANDTANYYCQHSRELPFTFGGGTKVEIKRTESPKAQASSVPTAQPQAEGSLAKATTAPATTRNTGRGGEEKKKEKEKEEQEERETKTPIYIWAPLAGTCGVLLLSLVITLYCKRGRKKLLYIFKQPFMRPVQTTQEEDGCSCRFPEEEEGGCELRVKFSRSADAPAYKQGQNQLYNELNLGRREEYDVLDKRRGRDPEMGGKPRRKNPQEGLYNELQKDKMAEAYSEIGMKGERRRGKGHDGLYQGLSTATKDTYDALHMQALPPR

SEQ ID NO: 682 - DNA, 129 bp, Artificial Sequence; identical to SEQ ID NO: 359
  X4 linker

SEQ ID NO: 683 - protein, 43 aa, Artificial Sequence; identical to SEQ ID NO: 360
  X4 linker

SEQ ID NO: 684 - DNA, 1416 bp, Artificial Sequence
  C2 CAR X4 linker
gaggtgcagctggtggagtctgggggaggcctggtcaagcctggggggtccctgagactctcctgtgcagcctctggattcaccttcagtggctatgccatgagctgggtccgccaggctccagggaaggggctggagtgggtctcaaccattagtagtggcggaacctacatatactaccccgactcagtgaagggccgattcaccatctccagagacaacgccaagaactcactgtatctgcaaatgaacagcctgagagccgaggacacggccgtgtattactgtgcgagacttgggggggataattactacgaatacttcgatgtctggggcaaagggaccacggtcaccgtctcctccggcggtggcggatccggcggtggcggatccggcggtggcggatccgacattgtgctgacccagtctccagcctccttggccgtgtctccaggacagagggccaccatcacctgcagagccagtaagagtgtcagtaccagcggatactcctacatgcactggtatcagcagaaaccaggacaacctcctaaactcctgatttacctggcatccaatctggagagcggggtcccagccaggttcagcggcagtgggtctgggaccgatttcaccctcacaattaatcctgtggaagctaatgatactgcaaattattactgtcagcacagtagggagctgcctttcacattcggcggagggaccaaggtggagatcaaacgaactgacaagacgcacaccaagccacctaaaccagctccagaactgctcggaggtcctggcaccggaaccggaggacctaccatcaaaccacctaagccacctaagcctgctcctaacctgctcggaggacctatctacatctgggcgcccttggccgggacttgtggggtccttctcctgtcactggttatcaccctttactgcaaacggggcagaaagaaactcctgtatatattcaaacaaccatttatgagaccagtacaaactactcaagaggaagatggctgtagctgccgatttccagaagaagaagaaggaggatgtgaactgagagtgaagttcagcaggagcgcagacgcccccgcgtacaagcagggccagaaccagctctataacgagctcaatctaggacgaagagaggagtacgatgttttggacaagagacgtggccgggaccctgagatggggggaaagccgagaaggaagaaccctcaggaaggcctgtacaatgaactgcagaaagataagatggcggaggcctacagtgagattgggatgaaaggcgagcgccggaggggcaaggggcacgatggcctttaccagggtctcagtacagccaccaaggacacctacgacgcccttcacatgcaggccctgccccctcgctgataa

SEQ ID NO: 685 - protein, 470 aa, Artificial Sequence
  C2 CAR X4 linker
EVQLVESGGGLVKPGGSLRLSCAASGFTFSGYAMSWVRQAPGKGLEWVSTISSGGTYIYYPDSVKGRFTISRDNAKNSLYLQMNSLRAEDTAVYYCARLGGDNYYEYFDVWGKGTTVTVSSGGGGSGGGGSGGGGSDIVLTQSPASLAVSPGQRATITCRASKSVSTSGYSYMHWYQQKPGQPPKLLIYLASNLESGVPARFSGSGSGTDFTLTINPVEANDTANYYCQHSRELPFTFGGGTKVEIKRTDKTHTKPPKPAPELLGGPGTGTGGPTIKPPKPPKPAPNLLGGPIYIWAPLAGTCGVLLLSLVITLYCKRGRKKLLYIFKQPFMRPVQTTQEEDGCSCRFPEEEEGGCELRVKFSRSADAPAYKQGQNQLYNELNLGRREEYDVLDKRRGRDPEMGGKPRRKNPQEGLYNELQKDKMAEAYSEIGMKGERRRGKGHDGLYQGLSTATKDTYDALHMQALPPR

SEQ ID NO: 686 - DNA, 729 bp, Artificial Sequence
  OKT3 scFv
caggtgcagctggtgcagagcggaggcggagtggtgcagcctggaagaagcctgcgcctgagctgcaaagcgagcggctatacctttacccgctataccatgcattgggtgcgccaggcgccgggcaaaggcctggaatggattggctatattaacccgagccgcggctataccaactataaccagaaagtgaaagatcgctttaccattagcaccgataaaagcaaaagcaccgcgtttctgcagatggatagcctgcgcccggaagataccgcggtgtattattgcgcgcgctattatgatgatcattattgcctggattattggggccagggcaccaccctgaccgtgagcagcggcggtggcggatccggcggtggcggatccggcggtggcggatccgatattcagatgacccagagcccgagcagcctgagcgcgagcgtgggcgatcgcgtgaccattacctgcagcgcgagcagcagcgtgagctatatgaactggtatcagcagaccccgggcaaagcgccgaaacgctggatttatgataccagcaaactggcgagcggcgtgccgagccgctttagcggcagcggcagcggcaccgattatacctttaccattagcagcctgcagccggaagatattgcgacctattattgccagcagtggagcagcaacccgtttacctttggccagggcaccaaactgcagattacccgctgataa

SEQ ID NO: 687 - protein, 241 aa, Artificial Sequence; identical to SEQ ID NO: 388
  OKT3 scFv

SEQ ID NO: 688 - DNA, 2187 bp, Artificial Sequence
  C2-FC-OKT3
gaggtgcagctggtggagtctgggggaggcctggtcaagcctggggggtccctgagactctcctgtgcagcctctggattcaccttcagtggctatgccatgagctgggtccgccaggctccagggaaggggctggagtgggtctcaaccattagtagtggcggaacctacatatactaccccgactcagtgaagggccgattcaccatctccagagacaacgccaagaactcactgtatctgcaaatgaacagcctgagagccgaggacacggccgtgtattactgtgcgagacttgggggggataattactacgaatacttcgatgtctggggcaaagggaccacggtcaccgtctcctccggcggtggcggatccggcggtggcggatccggcggtggcggatccgacattgtgctgacccagtctccagcctccttggccgtgtctccaggacagagggccaccatcacctgcagagccagtaagagtgtcagtaccagcggatactcctacatgcactggtatcagcagaaaccaggacaacctcctaaactcctgatttacctggcatccaatctggagagcggggtcccagccaggttcagcggcagtgggtctgggaccgatttcaccctcacaattaatcctgtggaagctaatgatactgcaaattattactgtcagcacagtagggagctgcctttcacattcggcggagggaccaaggtggagatcaaacgaactgagcccaaatcttgtgacaaaactcacacatgcccaccgtgcccagcacctgaactcctggggggaccgtcagtcttcctcttccccccaaaacccaaggacaccctcatgatctcccggacccctgaggtcacatgcgtggtggtggacgtgagccacgaagaccctgaggtcaagttcaactggtacgtggacggcgtggaggtgcataatgccaagacaaagccgcgggaggagcagtacaacagcacgtaccgtgtggtcagcgtcctcaccgtcctgcaccaggactggctgaatggcaaggagtacaagtgcaaggtctccaacaaagccctcccagcccccatcgagaaaaccatctccaaagccaaagggcagccccgagaaccacaggtgtacaccctgcccccatcccgggaggagatgaccaagaaccaggtcagcctgacctgcctggtcaaaggcttctatcccagcgacatcgccgtggagtgggagagcaatgggcagccggagaacaactacaagaccacgcctcccgtgctggactccgacggctccttcttcctctacagcaagctcaccgtggacaagagcaggtggcagcaggggaacgtcttctcatgctccgtgatgcatgaggctctgcacaaccactacacgcagaagagcctctccctgtctccgggtaaaggcggtggcggatcccaggtgcagctggtgcagagcggaggcggagtggtgcagcctggaagaagcctgcgcctgagctgcaaagcgagcggctatacctttacccgctataccatgcattgggtgcgccaggcgccgggcaaaggcctggaatggattggctatattaacccgagccgcggctataccaactataaccagaaagtgaaagatcgctttaccattagcaccgataaaagcaaaagcaccgcgtttctgcagatggatagcctgcgcccggaagataccgcggtgtattattgcgcgcgctattatgatgatcattattgcctggattattggggccagggcaccaccctgaccgtgagcagcggcggtggcggatccggcggtggcggatccggcggtggcggatccgatattcagatgacccagagcccgagcagcctgagcgcgagcgtgggcgatcgcgtgaccattacctgcagcgcgagcagcagcgtgagctatatgaactggtatcagcagaccccgggcaaagcgccgaaacgctggatttatgataccagcaaactggcgagcggcgtgccgagccgctttagcggcagcggcagcggcaccgattatacctttaccattagcagcctgcagccggaagatattgcgacctattattgccagcagtggagcagcaacccgtttacctttggccagggcaccaaactgcagattacccgctgataa

SEQ ID NO: 689 - protein, 727 aa, Artificial Sequence
  C2-FC-OKT3
EVQLVESGGGLVKPGGSLRLSCAASGFTFSGYAMSWVRQAPGKGLEWVSTISSGGTYIYYPDSVKGRFTISRDNAKNSLYLQMNSLRAEDTAVYYCARLGGDNYYEYFDVWGKGTTVTVSSGGGGSGGGGSGGGGSDIVLTQSPASLAVSPGQRATITCRASKSVSTSGYSYMHWYQQKPGQPPKLLIYLASNLESGVPARFSGSGSGTDFTLTINPVEANDTANYYCQHSRELPFTFGGGTKVEIKRTEPKSCDKTHTCPPCPAPELLGGPSVFLFPPKPKDTLMISRTPEVTCVVVDVSHEDPEVKFNWYVDGVEVHNAKTKPREEQYNSTYRVVSVLTVLHQDWLNGKEYKCKVSNKALPAPIEKTISKAKGQPREPQVYTLPPSREEMTKNQVSLTCLVKGFYPSDIAVEWESNGQPENNYKTTPPVLDSDGSFFLYSKLTVDKSRWQQGNVFSCSVMHEALHNHYTQKSLSLSPGKGGGGSQVQLVQSGGGVVQPGRSLRLSCKASGYTFTRYTMHWVRQAPGKGLEWIGYINPSRGYTNYNQKVKDRFTISTDKSKSTAFLQMDSLRPEDTAVYYCARYYDDHYCLDYWGQGTTLTVSSGGGGSGGGGSGGGGSDIQMTQSPSSLSASVGDRVTITCSASSSVSYMNWYQQTPGKAPKRWIYDTSKLASGVPSRFSGSGSGTDYTFTISSLQPEDIATYYCQQWSSNPFTFGQGTKLQITR

SEQ ID NO: 690 - DNA, 2361 bp, Artificial Sequence
  C2-IgD/FC-OKT3
gaggtgcagctggtggagtctgggggaggcctggtcaagcctggggggtccctgagactctcctgtgcagcctctggattcaccttcagtggctatgccatgagctgggtccgccaggctccagggaaggggctggagtgggtctcaaccattagtagtggcggaacctacatatactaccccgactcagtgaagggccgattcaccatctccagagacaacgccaagaactcactgtatctgcaaatgaacagcctgagagccgaggacacggccgtgtattactgtgcgagacttgggggggataattactacgaatacttcgatgtctggggcaaagggaccacggtcaccgtctcctccggcggtggcggatccggcggtggcggatccggcggtggcggatccgacattgtgctgacccagtctccagcctccttggccgtgtctccaggacagagggccaccatcacctgcagagccagtaagagtgtcagtaccagcggatactcctacatgcactggtatcagcagaaaccaggacaacctcctaaactcctgatttacctggcatccaatctggagagcggggtcccagccaggttcagcggcagtgggtctgggaccgatttcaccctcacaattaatcctgtggaagctaatgatactgcaaattattactgtcagcacagtagggagctgcctttcacattcggcggagggaccaaggtggagatcaaacgaactgagtctccaaaggcacaggcctcctcagtgcccactgcacaaccccaagcagagggcagcctcgccaaggcaaccacagccccagccaccacccgtaacacaggaagaggcggcgaagagaagaaaaaggagaaggagaaagaggaacaagaagagagagagacaaagacaccagagcccaaatcttgtgacaaaactcacacatgcccaccgtgcccagcacctgaactcctggggggaccgtcagtcttcctcttccccccaaaacccaaggacaccctcatgatctcccggacccctgaggtcacatgcgtggtggtggacgtgagccacgaagaccctgaggtcaagttcaactggtacgtggacggcgtggaggtgcataatgccaagacaaagccgcgggaggagcagtacaacagcacgtaccgtgtggtcagcgtcctcaccgtcctgcaccaggactggctgaatggcaaggagtacaagtgcaaggtctccaacaaagccctcccagcccccatcgagaaaaccatctccaaagccaaagggcagccccgagaaccacaggtgtacaccctgcccccatcccgggaggagatgaccaagaaccaggtcagcctgacctgcctggtcaaaggcttctatcccagcgacatcgccgtggagtgggagagcaatgggcagccggagaacaactacaagaccacgcctcccgtgctggactccgacggctccttcttcctctacagcaagctcaccgtggacaagagcaggtggcagcaggggaacgtcttctcatgctccgtgatgcatgaggctctgcacaaccactacacgcagaagagcctctccctgtctccgggtaaaggcggtggcggatcccaggtgcagctggtgcagagcggaggcggagtggtgcagcctggaagaagcctgcgcctgagctgcaaagcgagcggctatacctttacccgctataccatgcattgggtgcgccaggcgccgggcaaaggcctggaatggattggctatattaacccgagccgcggctataccaactataaccagaaagtgaaagatcgctttaccattagcaccgataaaagcaaaagcaccgcgtttctgcagatggatagcctgcgcccggaagataccgcggtgtattattgcgcgcgctattatgatgatcattattgcctggattattggggccagggcaccaccctgaccgtgagcagcggcggtggcggatccggcggtggcggatccggcggtggcggatccgatattcagatgacccagagcccgagcagcctgagcgcgagcgtgggcgatcgcgtgaccattacctgcagcgcgagcagcagcgtgagctatatgaactggtatcagcagaccccgggcaaagcgccgaaacgctggatttatgataccagcaaactggcgagcggcgtgccgagccgctttagcggcagcggcagcggcaccgattatacctttaccattagcagcctgcagccggaagatattgcgacctattattgccagcagtggagcagcaacccgtttacctttggccagggcaccaaactgcagattacccgctgataa

SEQ ID NO: 691 - protein, 785 aa, Artificial Sequence
  C2-IgD/FC-OKT3
EVQLVESGGGLVKPGGSLRLSCAASGFTFSGYAMSWVRQAPGKGLEWVSTISSGGTYIYYPDSVKGRFTISRDNAKNSLYLQMNSLRAEDTAVYYCARLGGDNYYEYFDVWGKGTTVTVSSGGGGSGGGGSGGGGSDIVLTQSPASLAVSPGQRATITCRASKSVSTSGYSYMHWYQQKPGQPPKLLIYLASNLESGVPARFSGSGSGTDFTLTINPVEANDTANYYCQHSRELPFTFGGGTKVEIKRTESPKAQASSVPTAQPQAEGSLAKATTAPATTRNTGRGGEEKKKEKEKEEQEERETKTPEPKSCDKTHTCPPCPAPELLGGPSVFLFPPKPKDTLMISRTPEVTCVVVDVSHEDPEVKFNWYVDGVEVHNAKTKPREEQYNSTYRVVSVLTVLHQDWLNGKEYKCKVSNKALPAPIEKTISKAKGQPREPQVYTLPPSREEMTKNQVSLTCLVKGFYPSDIAVEWESNGQPENNYKTTPPVLDSDGSFFLYSKLTVDKSRWQQGNVFSCSVMHEALHNHYTQKSLSLSPGKGGGGSQVQLVQSGGGVVQPGRSLRLSCKASGYTFTRYTMHWVRQAPGKGLEWIGYINPSRGYTNYNQKVKDRFTISTDKSKSTAFLQMDSLRPEDTAVYYCARYYDDHYCLDYWGQGTTLTVSSGGGGSGGGGSGGGGSDIQMTQSPSSLSASVGDRVTITCSASSSVSYMNWYQQTPGKAPKRWIYDTSKLASGVPSRFSGSGSGTDYTFTISSLQPEDIATYYCQQWSSNPFTFGQGTKLQITR

SEQ ID NO: 692 - DNA, 2142 bp, Artificial Sequence
  C2-FCHingeless/Y407R-OKT3
gaggtgcagctggtggagtctgggggaggcctggtcaagcctggggggtccctgagactctcctgtgcagcctctggattcaccttcagtggctatgccatgagctgggtccgccaggctccagggaaggggctggagtgggtctcaaccattagtagtggcggaacctacatatactaccccgactcagtgaagggccgattcaccatctccagagacaacgccaagaactcactgtatctgcaaatgaacagcctgagagccgaggacacggccgtgtattactgtgcgagacttgggggggataattactacgaatacttcgatgtctggggcaaagggaccacggtcaccgtctcctccggcggtggcggatccggcggtggcggatccggcggtggcggatccgacattgtgctgacccagtctccagcctccttggccgtgtctccaggacagagggccaccatcacctgcagagccagtaagagtgtcagtaccagcggatactcctacatgcactggtatcagcagaaaccaggacaacctcctaaactcctgatttacctggcatccaatctggagagcggggtcccagccaggttcagcggcagtgggtctgggaccgatttcaccctcacaattaatcctgtggaagctaatgatactgcaaattattactgtcagcacagtagggagctgcctttcacattcggcggagggaccaaggtggagatcaaacgaactgcacctgaactcctggggggaccgtcagtcttcctcttccccccaaaacccaaggacaccctcatgatctcccggacccctgaggtcacatgcgtggtggtggacgtgagccacgaagaccctgaggtcaagttcaactggtacgtggacggcgtggaggtgcataatgccaagacaaagccgcgggaggagcagtacaacagcacgtaccgtgtggtcagcgtcctcaccgtcctgcaccaggactggctgaatggcaaggagtacaagtgcaaggtctccaacaaagccctcccagcccccatcgagaaaaccatctccaaagccaaagggcagccccgagaaccacaggtgtacaccctgcccccatcccgggaggagatgaccaagaaccaggtcagcctgacctgcctggtcaaaggcttctatcccagcgacatcgccgtggagtgggagagcaatgggcagccggagaacaactacaagaccacgcctcccgtgctggactccgacggctccttcttcctcaggagcaagctcaccgtggacaagagcaggtggcagcaggggaacgtcttctcatgctccgtgatgcatgaggctctgcacaaccactacacgcagaagagcctctccctgtctccgggtaaaggcggtggcggatcccaggtgcagctggtgcagagcggaggcggagtggtgcagcctggaagaagcctgcgcctgagctgcaaagcgagcggctatacctttacccgctataccatgcattgggtgcgccaggcgccgggcaaaggcctggaatggattggctatattaacccgagccgcggctataccaactataaccagaaagtgaaagatcgctttaccattagcaccgataaaagcaaaagcaccgcgtttctgcagatggatagcctgcgcccggaagataccgcggtgtattattgcgcgcgctattatgatgatcattattgcctggattattggggccagggcaccaccctgaccgtgagcagcggcggtggcggatccggcggtggcggatccggcggtggcggatccgatattcagatgacccagagcccgagcagcctgagcgcgagcgtgggcgatcgcgtgaccattacctgcagcgcgagcagcagcgtgagctatatgaactggtatcagcagaccccgggcaaagcgccgaaacgctggatttatgataccagcaaactggcgagcggcgtgccgagccgctttagcggcagcggcagcggcaccgattatacctttaccattagcagcctgcagccggaagatattgcgacctattattgccagcagtggagcagcaacccgtttacctttggccagggcaccaaactgcagattacccgctgataa

SEQ ID NO: 693 - protein, 712 aa, Artificial Sequence
  C2-FCHingeless/Y407R-OKT3
EVQLVESGGGLVKPGGSLRLSCAASGFTFSGYAMSWVRQAPGKGLEWVSTISSGGTYIYYPDSVKGRFTISRDNAKNSLYLQMNSLRAEDTAVYYCARLGGDNYYEYFDVWGKGTTVTVSSGGGGSGGGGSGGGGSDIVLTQSPASLAVSPGQRATITCRASKSVSTSGYSYMHWYQQKPGQPPKLLIYLASNLESGVPARFSGSGSGTDFTLTINPVEANDTANYYCQHSRELPFTFGGGTKVEIKRTAPELLGGPSVFLFPPKPKDTLMISRTPEVTCVVVDVSHEDPEVKFNWYVDGVEVHNAKTKPREEQYNSTYRVVSVLTVLHQDWLNGKEYKCKVSNKALPAPIEKTISKAKGQPREPQVYTLPPSREEMTKNQVSLTCLVKGFYPSDIAVEWESNGQPENNYKTTPPVLDSDGSFFLRSKLTVDKSRWQQGNVFSCSVMHEALHNHYTQKSLSLSPGKGGGGSQVQLVQSGGGVVQPGRSLRLSCKASGYTFTRYTMHWVRQAPGKGLEWIGYINPSRGYTNYNQKVKDRFTISTDKSKSTAFLQMDSLRPEDTAVYYCARYYDDHYCLDYWGQGTTLTVSSGGGGSGGGGSGGGGSDIQMTQSPSSLSASVGDRVTITCSASSSVSYMNWYQQTPGKAPKRWIYDTSKLASGVPSRFSGSGSGTDYTFTISSLQPEDIATYYCQQWSSNPFTFGQGTKLQITR

SEQ ID NO: 694 - DNA, 2316 bp, Artificial Sequence
  C2-IgD/FCHingeless/Y407R-OKT3
gaggtgcagctggtggagtctgggggaggcctggtcaagcctggggggtccctgagactctcctgtgcagcctctggattcaccttcagtggctatgccatgagctgggtccgccaggctccagggaaggggctggagtgggtctcaaccattagtagtggcggaacctacatatactaccccgactcagtgaagggccgattcaccatctccagagacaacgccaagaactcactgtatctgcaaatgaacagcctgagagccgaggacacggccgtgtattactgtgcgagacttgggggggataattactacgaatacttcgatgtctggggcaaagggaccacggtcaccgtctcctccggcggtggcggatccggcggtggcggatccggcggtggcggatccgacattgtgctgacccagtctccagcctccttggccgtgtctccaggacagagggccaccatcacctgcagagccagtaagagtgtcagtaccagcggatactcctacatgcactggtatcagcagaaaccaggacaacctcctaaactcctgatttacctggcatccaatctggagagcggggtcccagccaggttcagcggcagtgggtctgggaccgatttcaccctcacaattaatcctgtggaagctaatgatactgcaaattattactgtcagcacagtagggagctgcctttcacattcggcggagggaccaaggtggagatcaaacgaactgagtctccaaaggcacaggcctcctcagtgcccactgcacaaccccaagcagagggcagcctcgccaaggcaaccacagccccagccaccacccgtaacacaggaagaggcggcgaagagaagaaaaaggagaaggagaaagaggaacaagaagagagagagacaaagacaccagcacctgaactcctggggggaccgtcagtcttcctcttccccccaaaacccaaggacaccctcatgatctcccggacccctgaggtcacatgcgtggtggtggacgtgagccacgaagaccctgaggtcaagttcaactggtacgtggacggcgtggaggtgcataatgccaagacaaagccgcgggaggagcagtacaacagcacgtaccgtgtggtcagcgtcctcaccgtcctgcaccaggactggctgaatggcaaggagtacaagtgcaaggtctccaacaaagccctcccagcccccatcgagaaaaccatctccaaagccaaagggcagccccgagaaccacaggtgtacaccctgcccccatcccgggaggagatgaccaagaaccaggtcagcctgacctgcctggtcaaaggcttctatcccagcgacatcgccgtggagtgggagagcaatgggcagccggagaacaactacaagaccacgcctcccgtgctggactccgacggctccttcttcctcaggagcaagctcaccgtggacaagagcaggtggcagcaggggaacgtcttctcatgctccgtgatgcatgaggctctgcacaaccactacacgcagaagagcctctccctgtctccgggtaaaggcggtggcggatcccaggtgcagctggtgcagagcggaggcggagtggtgcagcctggaagaagcctgcgcctgagctgcaaagcgagcggctatacctttacccgctataccatgcattgggtgcgccaggcgccgggcaaaggcctggaatggattggctatattaacccgagccgcggctataccaactataaccagaaagtgaaagatcgctttaccattagcaccgataaaagcaaaagcaccgcgtttctgcagatggatagcctgcgcccggaagataccgcggtgtattattgcgcgcgctattatgatgatcattattgcctggattattggggccagggcaccaccctgaccgtgagcagcggcggtggcggatccggcggtggcggatccggcggtggcggatccgatattcagatgacccagagcccgagcagcctgagcgcgagcgtgggcgatcgcgtgaccattacctgcagcgcgagcagcagcgtgagctatatgaactggtatcagcagaccccgggcaaagcgccgaaacgctggatttatgataccagcaaactggcgagcggcgtgccgagccgctttagcggcagcggcagcggcaccgattatacctttaccattagcagcctgcagccggaagatattgcgacctattattgccagcagtggagcagcaacccgtttacctttggccagggcaccaaactgcagattacccgctgataa

SEQ ID NO: 695 - protein, 770 aa, Artificial Sequence
  C2-IgD/FCHingeless/Y407R-OKT3
EVQLVESGGGLVKPGGSLRLSCAASGFTFSGYAMSWVRQAPGKGLEWVSTISSGGTYIYYPDSVKGRFTISRDNAKNSLYLQMNSLRAEDTAVYYCARLGGDNYYEYFDVWGKGTTVTVSSGGGGSGGGGSGGGGSDIVLTQSPASLAVSPGQRATITCRASKSVSTSGYSYMHWYQQKPGQPPKLLIYLASNLESGVPARFSGSGSGTDFTLTINPVEANDTANYYCQHSRELPFTFGGGTKVEIKRTESPKAQASSVPTAQPQAEGSLAKATTAPATTRNTGRGGEEKKKEKEKEEQEERETKTPAPELLGGPSVFLFPPKPKDTLMISRTPEVTCVVVDVSHEDPEVKFNWYVDGVEVHNAKTKPREEQYNSTYRVVSVLTVLHQDWLNGKEYKCKVSNKALPAPIEKTISKAKGQPREPQVYTLPPSREEMTKNQVSLTCLVKGFYPSDIAVEWESNGQPENNYKTTPPVLDSDGSFFLRSKLTVDKSRWQQGNVFSCSVMHEALHNHYTQKSLSLSPGKGGGGSQVQLVQSGGGVVQPGRSLRLSCKASGYTFTRYTMHWVRQAPGKGLEWIGYINPSRGYTNYNQKVKDRFTISTDKSKSTAFLQMDSLRPEDTAVYYCARYYDDHYCLDYWGQGTTLTVSSGGGGSGGGGSGGGGSDIQMTQSPSSLSASVGDRVTITCSASSSVSYMNWYQQTPGKAPKRWIYDTSKLASGVPSRFSGSGSGTDYTFTISSLQPEDIATYYCQQWSSNPFTFGQGTKLQITR

SEQ ID NO: 696 - DNA, 1665 bp, Artificial Sequence
  C2-IgD-OKT3
gaggtgcagctggtggagtctgggggaggcctggtcaagcctggggggtccctgagactctcctgtgcagcctctggattcaccttcagtggctatgccatgagctgggtccgccaggctccagggaaggggctggagtgggtctcaaccattagtagtggcggaacctacatatactaccccgactcagtgaagggccgattcaccatctccagagacaacgccaagaactcactgtatctgcaaatgaacagcctgagagccgaggacacggccgtgtattactgtgcgagacttgggggggataattactacgaatacttcgatgtctggggcaaagggaccacggtcaccgtctcctccggcggtggcggatccggcggtggcggatccggcggtggcggatccgacattgtgctgacccagtctccagcctccttggccgtgtctccaggacagagggccaccatcacctgcagagccagtaagagtgtcagtaccagcggatactcctacatgcactggtatcagcagaaaccaggacaacctcctaaactcctgatttacctggcatccaatctggagagcggggtcccagccaggttcagcggcagtgggtctgggaccgatttcaccctcacaattaatcctgtggaagctaatgatactgcaaattattactgtcagcacagtagggagctgcctttcacattcggcggagggaccaaggtggagatcaaacgaactgagtctccaaaggcacaggcctcctcagtgcccactgcacaaccccaagcagagggcagcctcgccaaggcaaccacagccccagccaccacccgtaacacaggaagaggcggcgaagagaagaaaaaggagaaggagaaagaggaacaagaagagagagagacaaagacaccaggcggtggcggatcccaggtgcagctggtgcagagcggaggcggagtggtgcagcctggaagaagcctgcgcctgagctgcaaagcgagcggctatacctttacccgctataccatgcattgggtgcgccaggcgccgggcaaaggcctggaatggattggctatattaacccgagccgcggctataccaactataaccagaaagtgaaagatcgctttaccattagcaccgataaaagcaaaagcaccgcgtttctgcagatggatagcctgcgcccggaagataccgcggtgtattattgcgcgcgctattatgatgatcattattgcctggattattggggccagggcaccaccctgaccgtgagcagcggcggtggcggatccggcggtggcggatccggcggtggcggatccgatattcagatgacccagagcccgagcagcctgagcgcgagcgtgggcgatcgcgtgaccattacctgcagcgcgagcagcagcgtgagctatatgaactggtatcagcagaccccgggcaaagcgccgaaacgctggatttatgataccagcaaactggcgagcggcgtgccgagccgctttagcggcagcggcagcggcaccgattatacctttaccattagcagcctgcagccggaagatattgcgacctattattgccagcagtggagcagcaacccgtttacctttggccagggcaccaaactgcagattacccgctgataa

SEQ ID NO: 697 - protein, 553 aa, Artificial Sequence
  C2-IgD-OKT3
EVQLVESGGGLVKPGGSLRLSCAASGFTFSGYAMSWVRQAPGKGLEWVSTISSGGTYIYYPDSVKGRFTISRDNAKNSLYLQMNSLRAEDTAVYYCARLGGDNYYEYFDVWGKGTTVTVSSGGGGSGGGGSGGGGSDIVLTQSPASLAVSPGQRATITCRASKSVSTSGYSYMHWYQQKPGQPPKLLIYLASNLESGVPARFSGSGSGTDFTLTINPVEANDTANYYCQHSRELPFTFGGGTKVEIKRTESPKAQASSVPTAQPQAEGSLAKATTAPATTRNTGRGGEEKKKEKEKEEQEERETKTPGGGGSQVQLVQSGGGVVQPGRSLRLSCKASGYTFTRYTMHWVRQAPGKGLEWIGYINPSRGYTNYNQKVKDRFTISTDKSKSTAFLQMDSLRPEDTAVYYCARYYDDHYCLDYWGQGTTLTVSSGGGGSGGGGSGGGGSDIQMTQSPSSLSASVGDRVTITCSASSSVSYMNWYQQTPGKAPKRWIYDTSKLASGVPSRFSGSGSGTDYTFTISSLQPEDIATYYCQQWSSNPFTFGQGTKLQITR

SEQ ID NO: 698 - DNA, 1620 bp, Artificial Sequence
  C2-X4-OKT3
gaggtgcagctggtggagtctgggggaggcctggtcaagcctggggggtccctgagactctcctgtgcagcctctggattcaccttcagtggctatgccatgagctgggtccgccaggctccagggaaggggctggagtgggtctcaaccattagtagtggcggaacctacatatactaccccgactcagtgaagggccgattcaccatctccagagacaacgccaagaactcactgtatctgcaaatgaacagcctgagagccgaggacacggccgtgtattactgtgcgagacttgggggggataattactacgaatacttcgatgtctggggcaaagggaccacggtcaccgtctcctccggcggtggcggatccggcggtggcggatccggcggtggcggatccgacattgtgctgacccagtctccagcctccttggccgtgtctccaggacagagggccaccatcacctgcagagccagtaagagtgtcagtaccagcggatactcctacatgcactggtatcagcagaaaccaggacaacctcctaaactcctgatttacctggcatccaatctggagagcggggtcccagccaggttcagcggcagtgggtctgggaccgatttcaccctcacaattaatcctgtggaagctaatgatactgcaaattattactgtcagcacagtagggagctgcctttcacattcggcggagggaccaaggtggagatcaaacgaactgacaagacgcacaccaagccacctaaaccagctccagaactgctcggaggtcctggcaccggaaccggaggacctaccatcaaaccacctaagccacctaagcctgctcctaacctgctcggaggacctggcggtggcggatcccaggtgcagctggtgcagagcggaggcggagtggtgcagcctggaagaagcctgcgcctgagctgcaaagcgagcggctatacctttacccgctataccatgcattgggtgcgccaggcgccgggcaaaggcctggaatggattggctatattaacccgagccgcggctataccaactataaccagaaagtgaaagatcgctttaccattagcaccgataaaagcaaaagcaccgcgtttctgcagatggatagcctgcgcccggaagataccgcggtgtattattgcgcgcgctattatgatgatcattattgcctggattattggggccagggcaccaccctgaccgtgagcagcggcggtggcggatccggcggtggcggatccggcggtggcggatccgatattcagatgacccagagcccgagcagcctgagcgcgagcgtgggcgatcgcgtgaccattacctgcagcgcgagcagcagcgtgagctatatgaactggtatcagcagaccccgggcaaagcgccgaaacgctggatttatgataccagcaaactggcgagcggcgtgccgagccgctttagcggcagcggcagcggcaccgattatacctttaccattagcagcctgcagccggaagatattgcgacctattattgccagcagtggagcagcaacccgtttacctttggccagggcaccaaactgcagattacccgctgataa

SEQ ID NO: 699 - protein, 538 aa, Artificial Sequence
  C2-X4-OKT3
EVQLVESGGGLVKPGGSLRLSCAASGFTFSGYAMSWVRQAPGKGLEWVSTISSGGTYIYYPDSVKGRFTISRDNAKNSLYLQMNSLRAEDTAVYYCARLGGDNYYEYFDVWGKGTTVTVSSGGGGSGGGGSGGGGSDIVLTQSPASLAVSPGQRATITCRASKSVSTSGYSYMHWYQQKPGQPPKLLIYLASNLESGVPARFSGSGSGTDFTLTINPVEANDTANYYCQHSRELPFTFGGGTKVEIKRTDKTHTKPPKPAPELLGGPGTGTGGPTIKPPKPPKPAPNLLGGPGGGGSQVQLVQSGGGVVQPGRSLRLSCKASGYTFTRYTMHWVRQAPGKGLEWIGYINPSRGYTNYNQKVKDRFTISTDKSKSTAFLQMDSLRPEDTAVYYCARYYDDHYCLDYWGQGTTLTVSSGGGGSGGGGSGGGGSDIQMTQSPSSLSASVGDRVTITCSASSSVSYMNWYQQTPGKAPKRWIYDTSKLASGVPSRFSGSGSGTDYTFTISSLQPEDIATYYCQQWSSNPFTFGQGTKLQITR

SEQ ID NO: 700 - DNA, 2910 bp, Artificial Sequence
  C2-MMP9
gaggtgcagctggtggagtctgggggaggcctggtcaagcctggggggtccctgagactctcctgtgcagcctctggattcaccttcagtggctatgccatgagctgggtccgccaggctccagggaaggggctggagtgggtctcaaccattagtagtggcggaacctacatatactaccccgactcagtgaagggccgattcaccatctccagagacaacgccaagaactcactgtatctgcaaatgaacagcctgagagccgaggacacggccgtgtattactgtgcgagacttgggggggataattactacgaatacttcgatgtctggggcaaagggaccacggtcaccgtctcctccggcggtggcggatccggcggtggcggatccggcggtggcggatccgacattgtgctgacccagtctccagcctccttggccgtgtctccaggacagagggccaccatcacctgcagagccagtaagagtgtcagtaccagcggatactcctacatgcactggtatcagcagaaaccaggacaacctcctaaactcctgatttacctggcatccaatctggagagcggggtcccagccaggttcagcggcagtgggtctgggaccgatttcaccctcacaattaatcctgtggaagctaatgatactgcaaattattactgtcagcacagtagggagctgcctttcacattcggcggagggaccaaggtggagatcaaacgaactggcggtggcggatccagcctctggcagcccctggtcctggtgctcctggtgctgggctgctgctttgctgcccccagacagcgccagtccacccttgtgctcttccctggagacctgagaaccaatctcaccgacaggcagctggcagaggaatacctgtaccgctatggttacactcgggtggcagagatgcgtggagagtcgaaatctctggggcctgcgctgctgcttctccagaagcaactgtccctgcccgagaccggtgagctggatagcgccacgctgaaggccatgcgaaccccacggtgcggggtcccagacctgggcagattccaaacctttgagggcgacctcaagtggcaccaccacaacatcacctattggatccaaaactactcggaagacttgccgcgggcggtgattgacgacgcctttgcccgcgccttcgcactgtggagcgcggtgacgccgctcaccttcactcgcgtgtacagccgggacgcagacatcgtcatccagtttggtgtcgcggagcacggagacgggtatcccttcgacgggaaggacgggctcctggcacacgcctttcctcctggccccggcattcagggagacgcccatttcgacgatgacgagttgtggtccctgggcaagggcgtcgtggttccaactcggtttggaaacgcagatggcgcggcctgccacttccccttcatcttcgagggccgctcctactctgcctgcaccaccgacggtcgctccgacggcttgccctggtgcagtaccacggccaactacgacaccgacgaccggtttggcttctgccccagcgagagactctacacccaggacggcaatgctgatgggaaaccctgccagtttccattcatcttccaaggccaatcctactccgcctgcaccacggacggtcgctccgacggctaccgctggtgcgccaccaccgccaactacgaccgggacaagctcttcggcttctgcccgacccgagctgactcgacggtgatggggggcaactcggcgggggagctgtgcgtcttccccttcactttcctgggtaaggagtactcgacctgtaccagcgagggccgcggagatgggcgcctctggtgcgctaccacctcgaactttgacagcgacaagaagtggggcttctgcccggaccaaggatacagtttgttcctcgtggcggcgcatgagttcggccacgcgctgggcttagatcattcctcagtgccggaggcgctcatgtaccctatgtaccgcttcactgaggggccccccttgcataaggacgacgtgaatggcatccggcacctctatggtcctcgccctgaacctgagccacggcctccaaccaccaccacaccgcagcccacggctcccccgacggtctgccccaccggaccccccactgtccacccctcagagcgccccacagctggccccacaggtcccccctcagctggccccacaggtccccccactgctggcccttctacggccactactgtgcctttgagtccggtggacgatgcctgcaacgtgaacatcttcgacgccatcgcggagattgggaaccagctgtatttgttcaaggatgggaagtactggcgattctctgagggcagggggagccggccgcagggccccttccttatcgccgacaagtggcccgcgctgccccgcaagctggactcggtctttgaggagcggctctccaagaagcttttcttcttctctgggcgccaggtgtgggtgtacacaggcgcgtcggtgctgggcccgaggcgtctggacaagctgggcctgggagccgacgtggcccaggtgaccggggccctccggagtggcagggggaagatgctgctgttcagcgggcggcgcctctggaggttcgacgtgaaggcgcagatggtggatccccggagcgccagcgaggtggaccggatgttccccggggtgcctttggacacgcacgacgtcttccagtaccgagagaaagcctatttctgccaggaccgcttctactggcgcgtgagttcccggagtgagttgaaccaggtggaccaagtgggctacgtgacctatgacatcctgcagtgccctgaggacgattacaaggatgacgacgataagtgataa

SEQ ID NO: 701 - protein, 968 aa, Artificial Sequence
  C2-MMP9
EVQLVESGGGLVKPGGSLRLSCAASGFTFSGYAMSWVRQAPGKGLEWVSTISSGGTYIYYPDSVKGRFTISRDNAKNSLYLQMNSLRAEDTAVYYCARLGGDNYYEYFDVWGKGTTVTVSSGGGGSGGGGSGGGGSDIVLTQSPASLAVSPGQRATITCRASKSVSTSGYSYMHWYQQKPGQPPKLLIYLASNLESGVPARFSGSGSGTDFTLTINPVEANDTANYYCQHSRELPFTFGGGTKVEIKRTGGGGSSLWQPLVLVLLVLGCCFAAPRQRQSTLVLFPGDLRTNLTDRQLAEEYLYRYGYTRVAEMRGESKSLGPALLLLQKQLSLPETGELDSATLKAMRTPRCGVPDLGRFQTFEGDLKWHHHNITYWIQNYSEDLPRAVIDDAFARAFALWSAVTPLTFTRVYSRDADIVIQFGVAEHGDGYPFDGKDGLLAHAFPPGPGIQGDAHFDDDELWSLGKGVVVPTRFGNADGAACHFPFIFEGRSYSACTTDGRSDGLPWCSTTANYDTDDRFGFCPSERLYTQDGNADGKPCQFPFIFQGQSYSACTTDGRSDGYRWCATTANYDRDKLFGFCPTRADSTVMGGNSAGELCVFPFTFLGKEYSTCTSEGRGDGRLWCATTSNFDSDKKWGFCPDQGYSLFLVAAHEFGHALGLDHSSVPEALMYPMYRFTEGPPLHKDDVNGIRHLYGPRPEPEPRPPTTTTPQPTAPPTVCPTGPPTVHPSERPTAGPTGPPSAGPTGPPTAGPSTATTVPLSPVDDACNVNIFDAIAEIGNQLYLFKDGKYWRFSEGRGSRPQGPFLIADKWPALPRKLDSVFEERLSKKLFFFSGRQVWVYTGASVLGPRRLDKLGLGADVAQVTGALRSGRGKMLLFSGRRLWRFDVKAQMVDPRSASEVDRMFPGVPLDTHDVFQYREKAYFCQDRFYWRVSSRSELNQVDQVGYVTYDILQCPEDDYKDDDDK

SEQ ID NO: 702 - DNA, 1821 bp, Artificial Sequence
  C2-MMP9cat
gaggtgcagctggtggagtctgggggaggcctggtcaagcctggggggtccctgagactctcctgtgcagcctctggattcaccttcagtggctatgccatgagctgggtccgccaggctccagggaaggggctggagtgggtctcaaccattagtagtggcggaacctacatatactaccccgactcagtgaagggccgattcaccatctccagagacaacgccaagaactcactgtatctgcaaatgaacagcctgagagccgaggacacggccgtgtattactgtgcgagacttgggggggataattactacgaatacttcgatgtctggggcaaagggaccacggtcaccgtctcctccggcggtggcggatccggcggtggcggatccggcggtggcggatccgacattgtgctgacccagtctccagcctccttggccgtgtctccaggacagagggccaccatcacctgcagagccagtaagagtgtcagtaccagcggatactcctacatgcactggtatcagcagaaaccaggacaacctcctaaactcctgatttacctggcatccaatctggagagcggggtcccagccaggttcagcggcagtgggtctgggaccgatttcaccctcacaattaatcctgtggaagctaatgatactgcaaattattactgtcagcacagtagggagctgcctttcacattcggcggagggaccaaggtggagatcaaacgaactggcggtggcggatccttccaaacctttgagggcgacctcaagtggcaccaccacaacatcacctattggatccaaaactactcggaagacttgccgcgggcggtgattgacgacgcctttgcccgcgccttcgcactgtggagcgcggtgacgccgctcaccttcactcgcgtgtacagccgggacgcagacatcgtcatccagtttggtgtcgcggagcacggagacgggtatcccttcgacgggaaggacgggctcctggcacacgcctttcctcctggccccggcattcagggagacgcccatttcgacgatgacgagttgtggtccctgggcaagggcgtcgtggttccaactcggtttggaaacgcagatggcgcggcctgccacttccccttcatcttcgagggccgctcctactctgcctgcaccaccgacggtcgctccgacggcttgccctggtgcagtaccacggccaactacgacaccgacgaccggtttggcttctgccccagcgagagactctacacccaggacggcaatgctgatgggaaaccctgccagtttccattcatcttccaaggccaatcctactccgcctgcaccacggacggtcgctccgacggctaccgctggtgcgccaccaccgccaactacgaccgggacaagctcttcggcttctgcccgacccgagctgactcgacggtgatggggggcaactcggcgggggagctgtgcgtcttccccttcactttcctgggtaaggagtactcgacctgtaccagcgagggccgcggagatgggcgcctctggtgcgctaccacctcgaactttgacagcgacaagaagtggggcttctgcccggaccaaggatacagtttgttcctcgtggcggcgcatgagttcggccacgcgctgggcttagatcattcctcagtgccggaggcgctcatgtaccctatgtaccgcttcactgaggggccccccttgcataaggacgacgtgaatggcatccggcacctctatggtcctcgccctgaacctgattacaaggatgacgacgataagtgataa

SEQ ID NO: 703 - protein, 605 aa, Artificial Sequence
  C2-MMP9cat
EVQLVESGGGLVKPGGSLRLSCAASGFTFSGYAMSWVRQAPGKGLEWVSTISSGGTYIYYPDSVKGRFTISRDNAKNSLYLQMNSLRAEDTAVYYCARLGGDNYYEYFDVWGKGTTVTVSSGGGGSGGGGSGGGGSDIVLTQSPASLAVSPGQRATITCRASKSVSTSGYSYMHWYQQKPGQPPKLLIYLASNLESGVPARFSGSGSGTDFTLTINPVEANDTANYYCQHSRELPFTFGGGTKVEIKRTGGGGSFQTFEGDLKWHHHNITYWIQNYSEDLPRAVIDDAFARAFALWSAVTPLTFTRVYSRDADIVIQFGVAEHGDGYPFDGKDGLLAHAFPPGPGIQGDAHFDDDELWSLGKGVVVPTRFGNADGAACHFPFIFEGRSYSACTTDGRSDGLPWCSTTANYDTDDRFGFCPSERLYTQDGNADGKPCQFPFIFQGQSYSACTTDGRSDGYRWCATTANYDRDKLFGFCPTRADSTVMGGNSAGELCVFPFTFLGKEYSTCTSEGRGDGRLWCATTSNFDSDKKWGFCPDQGYSLFLVAAHEFGHALGLDHSSVPEALMYPMYRFTEGPPLHKDDVNGIRHLYGPRPEPDYKDDDDK

SEQ ID NO: 704 - DNA, 30 bp, Artificial Sequence
  [G4S1]x2 linker sequence:
ggcggtggcggatccggcggtggcggatcc

SEQ ID NO: 705 - protein, 10 aa, Artificial Sequence
  [G4S1]x2 linker sequence:
GGGGSGGGGS

SEQ ID NO: 706 - DNA, 45 bp, Artificial Sequence; identical to SEQ ID NO: 401
  [G4S1]x3 linker sequence:

SEQ ID NO: 707 - protein, 15 aa, Artificial Sequence
  [G4S1]x3 linker sequence:
GGGGSGGGGSGGGGS

SEQ ID NO: 708 - DNA, 66 bp, Artificial Sequence; identical to SEQ ID NO: 409
  Long GS linker sequence:

SEQ ID NO: 709 - protein, 22 aa, Artificial Sequence
  Long GS linker sequence
GGGSGGGGSGSGGSGGGGSGGG

SEQ ID NO: 710 - DNA, 39 bp, Artificial Sequence; identical to SEQ ID NO: 407
  13 aa GS linker sequence

SEQ ID NO: 711 - protein, 13 aa, Artificial Sequence
  13 aa GS linker sequence
GGGSGGGGSGGGS

SEQ ID NO: 712 - DNA, 24 bp, Artificial Sequence
  8 aa GS linker sequence
ggcggttccggcggtggatccgga

SEQ ID NO: 713 - protein, 8 aa, Artificial Sequence
  8 aa GS linker sequence
GGSGGGSG

SEQ ID NO: 714 - DNA, 39 bp, Artificial Sequence; identical to SEQ ID NO: 405
  12 aa GS linker sequence

SEQ ID NO: 715 - protein, 12 aa, Artificial Sequence
  12 aa GS linker sequence
GGSGGGSGGGSG

SEQ ID NO: 716 - DNA, 78 bp, Artificial Sequence; identical to SEQ ID NO: 411
  24 aa GS linker sequence

SEQ ID NO: 717 - protein, 24 aa, Artificial Sequence
  24 aa GS linker sequence
GGSGGGSGGGSGGGSGGGSGGGSG

SEQ ID NO: 718 - DNA, 1485 bp, Artificial Sequence
  CAR-T C2 CD8/CD8/4-1BB/CD3z CAR44
atggccttaccagtgaccgccttgctcctgccgctggccttgctgctccacgccgccaggccggaggtgcagctggtggagtctgggggaggcctggtcaagcctggggggtccctgagactctcctgtgcagcctctggattcaccttcagtggctatgccatgagctgggtccgccaggctccagggaaggggctggagtgggtctcaaccattagtagtggcggaacctacatatactaccccgactcagtgaagggccgattcaccatctccagagacaacgccaagaactcactgtatctgcaaatgaacagcctgagagccgaggacacggccgtgtattactgtgcgagacttgggggggataattactacgaatacttcgatgtctggggcaaagggaccacggtcaccgtctcctccggcggtggcggatccggcggtggcggatccggcggtggcggatccgacattgtgctgacccagtctccagcctccttggccgtgtctccaggacagagggccaccatcacctgcagagccagtaagagtgtcagtaccagcggatactcctacatgcactggtatcagcagaaaccaggacaacctcctaaactcctgatttacctggcatccaatctggagagcggggtcccagccaggttcagcggcagtgggtctgggaccgatttcaccctcacaattaatcctgtggaagctaatgatactgcaaattattactgtcagcacagtagggagctgcctttcacattcggcggagggaccaaggtggagatcaaacgaactacaacaacccctgcccccagacctcctaccccagcccctacaattgccagccagcctctgagcctgaggcccgaggcttgtagacctgctgctggcggagccgtgcacaccagaggactggatttcgcctgcgacatctacatctgggcgcccttggccgggacttgtggggtccttctcctgtcactggttatcaccctttactgcaaacggggcagaaagaaactcctgtatatattcaaacaaccatttatgagaccagtacaaactactcaagaggaagatggctgtagctgccgatttccagaagaagaagaaggaggatgtgaactgagagtgaagttcagcaggagcgcagacgcccccgcgtacaagcagggccagaaccagctctataacgagctcaatctaggacgaagagaggagtacgatgttttggacaagagacgtggccgggaccctgagatggggggaaagccgagaaggaagaaccctcaggaaggcctgtacaatgaactgcagaaagataagatggcggaggcctacagtgagattgggatgaaaggcgagcgccggaggggcaaggggcacgatggcctttaccagggtctcagtacagccaccaaggacacctacgacgcccttcacatgcaggccctgccccctcgctgataa

SEQ ID NO: 719 - protein, 493 aa, Artificial Sequence; identical to SEQ ID NO: 611
  CAR-T C2 CD8/CD8/4-1BB/CD3z CAR44

SEQ ID NO: 720 - DNA, 1482 bp, Artificial Sequence
  CAR-T IgK C2 CD8/CD8/4-1BB/CD3z CAR45
atggagacagacacactcctgctatgggtactgctgctctgggttccaggttccactggtgaggtgcagctggtggagtctgggggaggcctggtcaagcctggggggtccctgagactctcctgtgcagcctctggattcaccttcagtggctatgccatgagctgggtccgccaggctccagggaaggggctggagtgggtctcaaccattagtagtggcggaacctacatatactaccccgactcagtgaagggccgattcaccatctccagagacaacgccaagaactcactgtatctgcaaatgaacagcctgagagccgaggacacggccgtgtattactgtgcgagacttgggggggataattactacgaatacttcgatgtctggggcaaagggaccacggtcaccgtctcctccggcggtggcggatccggcggtggcggatccggcggtggcggatccgacattgtgctgacccagtctccagcctccttggccgtgtctccaggacagagggccaccatcacctgcagagccagtaagagtgtcagtaccagcggatactcctacatgcactggtatcagcagaaaccaggacaacctcctaaactcctgatttacctggcatccaatctggagagcggggtcccagccaggttcagcggcagtgggtctgggaccgatttcaccctcacaattaatcctgtggaagctaatgatactgcaaattattactgtcagcacagtagggagctgcctttcacattcggcggagggaccaaggtggagatcaaacgaactacaacaacccctgcccccagacctcctaccccagcccctacaattgccagccagcctctgagcctgaggcccgaggcttgtagacctgctgctggcggagccgtgcacaccagaggactggatttcgcctgcgacatctacatctgggcgcccttggccgggacttgtggggtccttctcctgtcactggttatcaccctttactgcaaacggggcagaaagaaactcctgtatatattcaaacaaccatttatgagaccagtacaaactactcaagaggaagatggctgtagctgccgatttccagaagaagaagaaggaggatgtgaactgagagtgaagttcagcaggagcgcagacgcccccgcgtacaagcagggccagaaccagctctataacgagctcaatctaggacgaagagaggagtacgatgttttggacaagagacgtggccgggaccctgagatggggggaaagccgagaaggaagaaccctcaggaaggcctgtacaatgaactgcagaaagataagatggcggaggcctacagtgagattgggatgaaaggcgagcgccggaggggcaaggggcacgatggcctttaccagggtctcagtacagccaccaaggacacctacgacgcccttcacatgcaggccctgccccctcgctgataa

SEQ ID NO: 721 - protein, 492 aa, Artificial Sequence
  CAR-T IgK C2 CD8/CD8/4-1BB/CD3z CAR45
METDTLLLWVLLLWVPGSTGEVQLVESGGGLVKPGGSLRLSCAASGFTFSGYAMSWVRQAPGKGLEWVSTISSGGTYIYYPDSVKGRFTISRDNAKNSLYLQMNSLRAEDTAVYYCARLGGDNYYEYFDVWGKGTTVTVSSGGGGSGGGGSGGGGSDIVLTQSPASLAVSPGQRATITCRASKSVSTSGYSYMHWYQQKPGQPPKLLIYLASNLESGVPARFSGSGSGTDFTLTINPVEANDTANYYCQHSRELPFTFGGGTKVEIKRTTTTPAPRPPTPAPTIASQPLSLRPEACRPAAGGAVHTRGLDFACDIYIWAPLAGTCGVLLLSLVITLYCKRGRKKLLYIFKQPFMRPVQTTQEEDGCSCRFPEEEEGGCELRVKFSRSADAPAYKQGQNQLYNELNLGRREEYDVLDKRRGRDPEMGGKPRRKNPQEGLYNELQKDKMAEAYSEIGMKGERRRGKGHDGLYQGLSTATKDTYDALHMQALPPR

SEQ ID NO: 722 - DNA, 1485 bp, Artificial Sequence
  CAR-T C2 op CD8/CD8/4-1BB/CD3z CAR46
atggccttaccagtgaccgccttgctcctgccgctggccttgctgctccacgccgccaggccggaagtgcagctggtggaatctggcggcggactcgtgaagcctggcggctctctgagactgagctgtgccgccagcggcttcacctttagcggctacgccatgagctgggtgcgccaggctcctggcaaaggcctggaatgggtgtccaccatctctagcggcggcacctacatctactaccccgacagcgtgaagggccggttcaccatcagccgggacaacgccaagaacagcctgtacctgcagatgaactccctgcgggccgaggacaccgccgtgtactattgtgctagactgggcggcgacaactactacgagtacttcgacgtgtggggcaagggcaccaccgtgacagtgtctagcggaggcggaggatcaggcggcggaggaagtggcggagggggatctgatatcgtgctgacccagagccctgccagcctggctgtgtctcctggacagagggccaccatcacctgtcgggccagcaagagcgtgtccacctccggctacagctacatgcactggtatcagcagaagcccggccagccccccaagctgctgatctacctggccagcaacctggaaagcggcgtgcccgctagattttccggctctggcagcggcaccgacttcaccctgaccatcaaccccgtggaagccaacgacaccgccaattactactgccagcacagcagagagctgcccttcaccttcggcggaggcaccaaggtggaaatcaagcggaccacaacaacccctgcccccagacctcctaccccagcccctacaattgccagccagcctctgagcctgaggcccgaggcttgtagacctgctgctggcggagccgtgcacaccagaggactggatttcgcctgcgacatctacatctgggcgcccttggccgggacttgtggggtccttctcctgtcactggttatcaccctttactgcaaacggggcagaaagaaactcctgtatatattcaaacaaccatttatgagaccagtacaaactactcaagaggaagatggctgtagctgccgatttccagaagaagaagaaggaggatgtgaactgagagtgaagttcagcaggagcgcagacgcccccgcgtacaagcagggccagaaccagctctataacgagctcaatctaggacgaagagaggagtacgatgttttggacaagagacgtggccgggaccctgagatggggggaaagccgagaaggaagaaccctcaggaaggcctgtacaatgaactgcagaaagataagatggcggaggcctacagtgagattgggatgaaaggcgagcgccggaggggcaaggggcacgatggcctttaccagggtctcagtacagccaccaaggacacctacgacgcccttcacatgcaggccctgccccctcgctgataa

SEQ ID NO: 723 - protein, 493 aa, Artificial Sequence; identical to SEQ ID NO: 611
  CAR-T C2 op CD8/CD8/4-1BB/CD3z CAR46

SEQ ID NO: 724 - DNA, 1482 bp, Artificial Sequence
  CAR-T IgK C2 op CD8/CD8/4-1BB/CD3z CAR47
atggagacagacacactcctgctatgggtactgctgctctgggttccaggttccactggtgaagtgcagctggtggaatctggcggcggactcgtgaagcctggcggctctctgagactgagctgtgccgccagcggcttcacctttagcggctacgccatgagctgggtgcgccaggctcctggcaaaggcctggaatgggtgtccaccatctctagcggcggcacctacatctactaccccgacagcgtgaagggccggttcaccatcagccgggacaacgccaagaacagcctgtacctgcagatgaactccctgcgggccgaggacaccgccgtgtactattgtgctagactgggcggcgacaactactacgagtacttcgacgtgtggggcaagggcaccaccgtgacagtgtctagcggaggcggaggatcaggcggcggaggaagtggcggagggggatctgatatcgtgctgacccagagccctgccagcctggctgtgtctcctggacagagggccaccatcacctgtcgggccagcaagagcgtgtccacctccggctacagctacatgcactggtatcagcagaagcccggccagccccccaagctgctgatctacctggccagcaacctggaaagcggcgtgcccgctagattttccggctctggcagcggcaccgacttcaccctgaccatcaaccccgtggaagccaacgacaccgccaattactactgccagcacagcagagagctgcccttcaccttcggcggaggcaccaaggtggaaatcaagcggaccacaacaacccctgcccccagacctcctaccccagcccctacaattgccagccagcctctgagcctgaggcccgaggcttgtagacctgctgctggcggagccgtgcacaccagaggactggatttcgcctgcgacatctacatctgggcgcccttggccgggacttgtggggtccttctcctgtcactggttatcaccctttactgcaaacggggcagaaagaaactcctgtatatattcaaacaaccatttatgagaccagtacaaactactcaagaggaagatggctgtagctgccgatttccagaagaagaagaaggaggatgtgaactgagagtgaagttcagcaggagcgcagacgcccccgcgtacaagcagggccagaaccagctctataacgagctcaatctaggacgaagagaggagtacgatgttttggacaagagacgtggccgggaccctgagatggggggaaagccgagaaggaagaaccctcaggaaggcctgtacaatgaactgcagaaagataagatggcggaggcctacagtgagattgggatgaaaggcgagcgccggaggggcaaggggcacgatggcctttaccagggtctcagtacagccaccaaggacacctacgacgcccttcacatgcaggccctgccccctcgctgataa

SEQ ID NO: 725 - protein, 492 aa, Artificial Sequence; identical to SEQ ID NO: 721
  CAR-T IgK C2 op CD8/CD8/4-1BB/CD3z CAR47

SEQ ID NO: 726 - DNA, 1485 bp, Artificial Sequence
  CAR-T C2 CD8/CD8/4-1BB/CD3z op CAR48
atggccttaccagtgaccgccttgctcctgccgctggccttgctgctccacgccgccaggccggaagtgcagctggtggaatctggcggcggactcgtgaagcctggcggctctctgagactgagctgtgccgccagcggcttcacctttagcggctacgccatgagctgggtgcgccaggctcctggcaaaggcctggaatgggtgtccaccatctctagcggcggcacctacatctactaccccgacagcgtgaagggccggttcaccatcagccgggacaacgccaagaacagcctgtacctgcagatgaactccctgcgggccgaggacaccgccgtgtactattgtgctagactgggcggcgacaactactacgagtacttcgacgtgtggggcaagggcaccaccgtgacagtgtctagcggaggcggaggatcaggcggcggaggaagtggcggagggggatctgatatcgtgctgacccagagccctgccagcctggctgtgtctcctggacagagggccaccatcacctgtcgggccagcaagagcgtgtccacctccggctacagctacatgcactggtatcagcagaagcccggccagccccccaagctgctgatctacctggccagcaacctggaaagcggcgtgcccgctagattttccggctctggcagcggcaccgacttcaccctgaccatcaaccccgtggaagccaacgacaccgccaattactactgccagcacagcagagagctgcccttcaccttcggcggaggcaccaaggtggaaatcaagcggaccacaacaacccctgcccccagacctcctaccccagcccctacaattgccagccagcctctgagcctgaggcccgaggcttgtagacctgctgctggcggagccgtgcacaccagaggactggatttcgcctgcgacatctacatctgggcccctctggccggcacatgtggcgtgctgctgctgagcctcgtgatcaccctgtactgcaagcggggcagaaagaagctgctgtacatcttcaagcagcccttcatgcggcccgtgcagaccacccaggaagaggacggctgctcctgcagattccccgaggaagaagaaggcggctgcgagctgagagtgaagttcagcagatccgccgacgcccctgcctacaagcagggccagaaccagctgtacaacgagctgaacctgggcagacgggaagagtacgacgtgctggacaagcggagaggcagggaccctgagatgggcggcaagcccagaagaaagaacccccaggaaggcctgtataacgaactgcagaaagacaagatggccgaggcctacagcgagatcggaatgaagggcgagcggagaagaggcaagggccacgatggcctgtaccagggcctgagcaccgccaccaaggacacctatgacgccctgcacatgcaggccctgcctcccagatgataa

SEQ ID NO: 727 - protein, 493 aa, Artificial Sequence; identical to SEQ ID NO: 611
  CAR-T C2 CD8/CD8/4-1BB/CD3z op CAR48

SEQ ID NO: 728 - DNA, 1482 bp, Artificial Sequence
  CAR-T IgK C2 CD8/CD8/4-1BB/CD3z op CAR49
atggagacagacacactcctgctatgggtactgctgctctgggttccaggttccactggtgaagtgcagctggtggaatctggcggcggactcgtgaagcctggcggctctctgagactgagctgtgccgccagcggcttcacctttagcggctacgccatgagctgggtgcgccaggctcctggcaaaggcctggaatgggtgtccaccatctctagcggcggcacctacatctactaccccgacagcgtgaagggccggttcaccatcagccgggacaacgccaagaacagcctgtacctgcagatgaactccctgcgggccgaggacaccgccgtgtactattgtgctagactgggcggcgacaactactacgagtacttcgacgtgtggggcaagggcaccaccgtgacagtgtctagcggaggcggaggatcaggcggcggaggaagtggcggagggggatctgatatcgtgctgacccagagccctgccagcctggctgtgtctcctggacagagggccaccatcacctgtcgggccagcaagagcgtgtccacctccggctacagctacatgcactggtatcagcagaagcccggccagccccccaagctgctgatctacctggccagcaacctggaaagcggcgtgcccgctagattttccggctctggcagcggcaccgacttcaccctgaccatcaaccccgtggaagccaacgacaccgccaattactactgccagcacagcagagagctgcccttcaccttcggcggaggcaccaaggtggaaatcaagcggaccacaacaacccctgcccccagacctcctaccccagcccctacaattgccagccagcctctgagcctgaggcccgaggcttgtagacctgctgctggcggagccgtgcacaccagaggactggatttcgcctgcgacatctacatctgggcccctctggccggcacatgtggcgtgctgctgctgagcctcgtgatcaccctgtactgcaagcggggcagaaagaagctgctgtacatcttcaagcagcccttcatgcggcccgtgcagaccacccaggaagaggacggctgctcctgcagattccccgaggaagaagaaggcggctgcgagctgagagtgaagttcagcagatccgccgacgcccctgcctacaagcagggccagaaccagctgtacaacgagctgaacctgggcagacgggaagagtacgacgtgctggacaagcggagaggcagggaccctgagatgggcggcaagcccagaagaaagaacccccaggaaggcctgtataacgaactgcagaaagacaagatggccgaggcctacagcgagatcggaatgaagggcgagcggagaagaggcaagggccacgatggcctgtaccagggcctgagcaccgccaccaaggacacctatgacgccctgcacatgcaggccctgcctcccagatgataa

SEQ ID NO: 729 - protein, 492 aa, Artificial Sequence; identical to SEQ ID NO: 721
  CAR-T IgK C2 CD8/CD8/4-1BB/CD3z op CAR49

SEQ ID NO: 730 - DNA, 1410 bp, Artificial Sequence
  CAR-T C2 CD4/CD4/4-1BB/CD3z CAR50
atggccttaccagtgaccgccttgctcctgccgctggccttgctgctccacgccgccaggccggaggtgcagctggtggagtctgggggaggcctggtcaagcctggggggtccctgagactctcctgtgcagcctctggattcaccttcagtggctatgccatgagctgggtccgccaggctccagggaaggggctggagtgggtctcaaccattagtagtggcggaacctacatatactaccccgactcagtgaagggccgattcaccatctccagagacaacgccaagaactcactgtatctgcaaatgaacagcctgagagccgaggacacggccgtgtattactgtgcgagacttgggggggataattactacgaatacttcgatgtctggggcaaagggaccacggtcaccgtctcctccggcggtggcggatccggcggtggcggatccggcggtggcggatccgacattgtgctgacccagtctccagcctccttggccgtgtctccaggacagagggccaccatcacctgcagagccagtaagagtgtcagtaccagcggatactcctacatgcactggtatcagcagaaaccaggacaacctcctaaactcctgatttacctggcatccaatctggagagcggggtcccagccaggttcagcggcagtgggtctgggaccgatttcaccctcacaattaatcctgtggaagctaatgatactgcaaattattactgtcagcacagtagggagctgcctttcacattcggcggagggaccaaggtggagatcaaacgaacttcgggacaggtcctgctggaatccaacatcaaggttctgcccacatggtccaccccggtgcagccaatggccctgattgtgctggggggcgtcgccggcctcctgcttttcattgggctaggcatcttcttcaaacggggcagaaagaaactcctgtatatattcaaacaaccatttatgagaccagtacaaactactcaagaggaagatggctgtagctgccgatttccagaagaagaagaaggaggatgtgaactgagagtgaagttcagcaggagcgcagacgcccccgcgtacaagcagggccagaaccagctctataacgagctcaatctaggacgaagagaggagtacgatgttttggacaagagacgtggccgggaccctgagatggggggaaagccgagaaggaagaaccctcaggaaggcctgtacaatgaactgcagaaagataagatggcggaggcctacagtgagattgggatgaaaggcgagcgccggaggggcaaggggcacgatggcctttaccagggtctcagtacagccaccaaggacacctacgacgcccttcacatgcaggccctgccccctcgctgataa

SEQ ID NO: 731 - protein, 468 aa, Artificial Sequence
  CAR-T C2 CD4/CD4/4-1BB/CD3z CAR50
MALPVTALLLPLALLLHAARPEVQLVESGGGLVKPGGSLRLSCAASGFTFSGYAMSWVRQAPGKGLEWVSTISSGGTYIYYPDSVKGRFTISRDNAKNSLYLQMNSLRAEDTAVYYCARLGGDNYYEYFDVWGKGTTVTVSSGGGGSGGGGSGGGGSDIVLTQSPASLAVSPGQRATITCRASKSVSTSGYSYMHWYQQKPGQPPKLLIYLASNLESGVPARFSGSGSGTDFTLTINPVEANDTANYYCQHSRELPFTFGGGTKVEIKRTSGQVLLESNIKVLPTWSTPVQPMALIVLGGVAGLLLFIGLGIFFKRGRKKLLYIFKQPFMRPVQTTQEEDGCSCRFPEEEEGGCELRVKFSRSADAPAYKQGQNQLYNELNLGRREEYDVLDKRRGRDPEMGGKPRRKNPQEGLYNELQKDKMAEAYSEIGMKGERRRGKGHDGLYQGLSTATKDTYDALHMQALPPR

SEQ ID NO: 732 - DNA, 2046 bp, Artificial Sequence
  CAR-T C2 FC/CD8/4-1BB/CD3z "Fc" CAR53
atggccttaccagtgaccgccttgctcctgccgctggccttgctgctccacgccgccaggccggaggtgcagctggtggagtctgggggaggcctggtcaagcctggggggtccctgagactctcctgtgcagcctctggattcaccttcagtggctatgccatgagctgggtccgccaggctccagggaaggggctggagtgggtctcaaccattagtagtggcggaacctacatatactaccccgactcagtgaagggccgattcaccatctccagagacaacgccaagaactcactgtatctgcaaatgaacagcctgagagccgaggacacggccgtgtattactgtgcgagacttgggggggataattactacgaatacttcgatgtctggggcaaagggaccacggtcaccgtctcctccggcggtggcggatccggcggtggcggatccggcggtggcggatccgacattgtgctgacccagtctccagcctccttggccgtgtctccaggacagagggccaccatcacctgcagagccagtaagagtgtcagtaccagcggatactcctacatgcactggtatcagcagaaaccaggacaacctcctaaactcctgatttacctggcatccaatctggagagcggggtcccagccaggttcagcggcagtgggtctgggaccgatttcaccctcacaattaatcctgtggaagctaatgatactgcaaattattactgtcagcacagtagggagctgcctttcacattcggcggagggaccaaggtggagatcaaacgaactgagcccaaatcttgtgacaaaactcacacatgcccaccgtgcccagcacctgaactcctggggggaccgtcagtcttcctcttccccccaaaacccaaggacaccctcatgatctcccggacccctgaggtcacatgcgtggtggtggacgtgagccacgaagaccctgaggtcaagttcaactggtacgtggacggcgtggaggtgcataatgccaagacaaagccgcgggaggagcagtacaacagcacgtaccgtgtggtcagcgtcctcaccgtcctgcaccaggactggctgaatggcaaggagtacaagtgcaaggtctccaacaaagccctcccagcccccatcgagaaaaccatctccaaagccaaagggcagccccgagaaccacaggtgtacaccctgcccccatcccgggaggagatgaccaagaaccaggtcagcctgacctgcctggtcaaaggcttctatcccagcgacatcgccgtggagtgggagagcaatgggcagccggagaacaactacaagaccacgcctcccgtgctggactccgacggctccttcttcctctacagcaagctcaccgtggacaagagcaggtggcagcaggggaacgtcttctcatgctccgtgatgcatgaggctctgcacaaccactacacgcagaagagcctctccctgtctccgggtaaaatctacatctgggcgcccttggccgggacttgtggggtccttctcctgtcactggttatcaccctttactgcaaacggggcagaaagaaactcctgtatatattcaaacaaccatttatgagaccagtacaaactactcaagaggaagatggctgtagctgccgatttccagaagaagaagaaggaggatgtgaactgagagtgaagttcagcaggagcgcagacgcccccgcgtacaagcagggccagaaccagctctataacgagctcaatctaggacgaagagaggagtacgatgttttggacaagagacgtggccgggaccctgagatggggggaaagccgagaaggaagaaccctcaggaaggcctgtacaatgaactgcagaaagataagatggcggaggcctacagtgagattgggatgaaaggcgagcgccggaggggcaaggggcacgatggcctttaccagggtctcagtacagccaccaaggacacctacgacgcccttcacatgcaggccctgccccctcgctgataa

SEQ ID NO: 733 - protein, 680 aa, Artificial Sequence
  CAR-T C2 FC/CD8/4-1BB/CD3z "Fc" CAR53
MALPVTALLLPLALLLHAARPEVQLVESGGGLVKPGGSLRLSCAASGFTFSGYAMSWVRQAPGKGLEWVSTISSGGTYIYYPDSVKGRFTISRDNAKNSLYLQMNSLRAEDTAVYYCARLGGDNYYEYFDVWGKGTTVTVSSGGGGSGGGGSGGGGSDIVLTQSPASLAVSPGQRATITCRASKSVSTSGYSYMHWYQQKPGQPPKLLIYLASNLESGVPARFSGSGSGTDFTLTINPVEANDTANYYCQHSRELPFTFGGGTKVEIKRTEPKSCDKTHTCPPCPAPELLGGPSVFLFPPKPKDTLMISRTPEVTCVVVDVSHEDPEVKFNWYVDGVEVHNAKTKPREEQYNSTYRVVSVLTVLHQDWLNGKEYKCKVSNKALPAPIEKTISKAKGQPREPQVYTLPPSREEMTKNQVSLTCLVKGFYPSDIAVEWESNGQPENNYKTTPPVLDSDGSFFLYSKLTVDKSRWQQGNVFSCSVMHEALHNHYTQKSLSLSPGKIYIWAPLAGTCGVLLLSLVITLYCKRGRKKLLYIFKQPFMRPVQTTQEEDGCSCRFPEEEEGGCELRVKFSRSADAPAYKQGQNQLYNELNLGRREEYDVLDKRRGRDPEMGGKPRRKNPQEGLYNELQKDKMAEAYSEIGMKGERRRGKGHDGLYQGLSTATKDTYDALHMQALPPR

SEQ ID NO: 734 - DNA, 2220 bp, Artificial Sequence
  CAR-T C2 IgD/FC/CD8/4-1BB/CD3z "IgD-Fc" CAR54
atggccttaccagtgaccgccttgctcctgccgctggccttgctgctccacgccgccaggccggaggtgcagctggtggagtctgggggaggcctggtcaagcctggggggtccctgagactctcctgtgcagcctctggattcaccttcagtggctatgccatgagctgggtccgccaggctccagggaaggggctggagtgggtctcaaccattagtagtggcggaacctacatatactaccccgactcagtgaagggccgattcaccatctccagagacaacgccaagaactcactgtatctgcaaatgaacagcctgagagccgaggacacggccgtgtattactgtgcgagacttgggggggataattactacgaatacttcgatgtctggggcaaagggaccacggtcaccgtctcctccggcggtggcggatccggcggtggcggatccggcggtggcggatccgacattgtgctgacccagtctccagcctccttggccgtgtctccaggacagagggccaccatcacctgcagagccagtaagagtgtcagtaccagcggatactcctacatgcactggtatcagcagaaaccaggacaacctcctaaactcctgatttacctggcatccaatctggagagcggggtcccagccaggttcagcggcagtgggtctgggaccgatttcaccctcacaattaatcctgtggaagctaatgatactgcaaattattactgtcagcacagtagggagctgcctttcacattcggcggagggaccaaggtggagatcaaacgaactgagtctccaaaggcacaggcctcctcagtgcccactgcacaaccccaagcagagggcagcctcgccaaggcaaccacagccccagccaccacccgtaacacaggaagaggcggcgaagagaagaaaaaggagaaggagaaagaggaacaagaagagagagagacaaagacaccagagcccaaatcttgtgacaaaactcacacatgcccaccgtgcccagcacctgaactcctggggggaccgtcagtcttcctcttccccccaaaacccaaggacaccctcatgatctcccggacccctgaggtcacatgcgtggtggtggacgtgagccacgaagaccctgaggtcaagttcaactggtacgtggacggcgtggaggtgcataatgccaagacaaagccgcgggaggagcagtacaacagcacgtaccgtgtggtcagcgtcctcaccgtcctgcaccaggactggctgaatggcaaggagtacaagtgcaaggtctccaacaaagccctcccagcccccatcgagaaaaccatctccaaagccaaagggcagccccgagaaccacaggtgtacaccctgcccccatcccgggaggagatgaccaagaaccaggtcagcctgacctgcctggtcaaaggcttctatcccagcgacatcgccgtggagtgggagagcaatgggcagccggagaacaactacaagaccacgcctcccgtgctggactccgacggctccttcttcctctacagcaagctcaccgtggacaagagcaggtggcagcaggggaacgtcttctcatgctccgtgatgcatgaggctctgcacaaccactacacgcagaagagcctctccctgtctccgggtaaaatctacatctgggcgcccttggccgggacttgtggggtccttctcctgtcactggttatcaccctttactgcaaacggggcagaaagaaactcctgtatatattcaaacaaccatttatgagaccagtacaaactactcaagaggaagatggctgtagctgccgatttccagaagaagaagaaggaggatgtgaactgagagtgaagttcagcaggagcgcagacgcccccgcgtacaagcagggccagaaccagctctataacgagctcaatctaggacgaagagaggagtacgatgttttggacaagagacgtggccgggaccctgagatggggggaaagccgagaaggaagaaccctcaggaaggcctgtacaatgaactgcagaaagataagatggcggaggcctacagtgagattgggatgaaaggcgagcgccggaggggcaaggggcacgatggcctttaccagggtctcagtacagccaccaaggacacctacgacgcccttcacatgcaggccctgccccctcgctgataa

SEQ ID NO: 735 - protein, 738 aa, Artificial Sequence
  CAR-T C2 IgD/FC/CD8/4-1BB/CD3z "IgD-Fc" CAR54
MALPVTALLLPLALLLHAARPEVQLVESGGGLVKPGGSLRLSCAASGFTFSGYAMSWVRQAPGKGLEWVSTISSGGTYIYYPDSVKGRFTISRDNAKNSLYLQMNSLRAEDTAVYYCARLGGDNYYEYFDVWGKGTTVTVSSGGGGSGGGGSGGGGSDIVLTQSPASLAVSPGQRATITCRASKSVSTSGYSYMHWYQQKPGQPPKLLIYLASNLESGVPARFSGSGSGTDFTLTINPVEANDTANYYCQHSRELPFTFGGGTKVEIKRTESPKAQASSVPTAQPQAEGSLAKATTAPATTRNTGRGGEEKKKEKEKEEQEERETKTPEPKSCDKTHTCPPCPAPELLGGPSVFLFPPKPKDTLMISRTPEVTCVVVDVSHEDPEVKFNWYVDGVEVHNAKTKPREEQYNSTYRVVSVLTVLHQDWLNGKEYKCKVSNKALPAPIEKTISKAKGQPREPQVYTLPPSREEMTKNQVSLTCLVKGFYPSDIAVEWESNGQPENNYKTTPPVLDSDGSFFLYSKLTVDKSRWQQGNVFSCSVMHEALHNHYTQKSLSLSPGKIYIWAPLAGTCGVLLLSLVITLYCKRGRKKLLYIFKQPFMRPVQTTQEEDGCSCRFPEEEEGGCELRVKFSRSADAPAYKQGQNQLYNELNLGRREEYDVLDKRRGRDPEMGGKPRRKNPQEGLYNELQKDKMAEAYSEIGMKGERRRGKGHDGLYQGLSTATKDTYDALHMQALPPR

SEQ ID NO: 736 - DNA, 2001 bp, Artificial Sequence
  CAR-T C2 FCHingeless Y407R/CD8/4-1BB/CD3z "FcH" CAR55
atggccttaccagtgaccgccttgctcctgccgctggccttgctgctccacgccgccaggccggaggtgcagctggtggagtctgggggaggcctggtcaagcctggggggtccctgagactctcctgtgcagcctctggattcaccttcagtggctatgccatgagctgggtccgccaggctccagggaaggggctggagtgggtctcaaccattagtagtggcggaacctacatatactaccccgactcagtgaagggccgattcaccatctccagagacaacgccaagaactcactgtatctgcaaatgaacagcctgagagccgaggacacggccgtgtattactgtgcgagacttgggggggataattactacgaatacttcgatgtctggggcaaagggaccacggtcaccgtctcctccggcggtggcggatccggcggtggcggatccggcggtggcggatccgacattgtgctgacccagtctccagcctccttggccgtgtctccaggacagagggccaccatcacctgcagagccagtaagagtgtcagtaccagcggatactcctacatgcactggtatcagcagaaaccaggacaacctcctaaactcctgatttacctggcatccaatctggagagcggggtcccagccaggttcagcggcagtgggtctgggaccgatttcaccctcacaattaatcctgtggaagctaatgatactgcaaattattactgtcagcacagtagggagctgcctttcacattcggcggagggaccaaggtggagatcaaacgaactgcacctgaactcctggggggaccgtcagtcttcctcttccccccaaaacccaaggacaccctcatgatctcccggacccctgaggtcacatgcgtggtggtggacgtgagccacgaagaccctgaggtcaagttcaactggtacgtggacggcgtggaggtgcataatgccaagacaaagccgcgggaggagcagtacaacagcacgtaccgtgtggtcagcgtcctcaccgtcctgcaccaggactggctgaatggcaaggagtacaagtgcaaggtctccaacaaagccctcccagcccccatcgagaaaaccatctccaaagccaaagggcagccccgagaaccacaggtgtacaccctgcccccatcccgggaggagatgaccaagaaccaggtcagcctgacctgcctggtcaaaggcttctatcccagcgacatcgccgtggagtgggagagcaatgggcagccggagaacaactacaagaccacgcctcccgtgctggactccgacggctccttcttcctcaggagcaagctcaccgtggacaagagcaggtggcagcaggggaacgtcttctcatgctccgtgatgcatgaggctctgcacaaccactacacgcagaagagcctctccctgtctccgggtaaaatctacatctgggcgcccttggccgggacttgtggggtccttctcctgtcactggttatcaccctttactgcaaacggggcagaaagaaactcctgtatatattcaaacaaccatttatgagaccagtacaaactactcaagaggaagatggctgtagctgccgatttccagaagaagaagaaggaggatgtgaactgagagtgaagttcagcaggagcgcagacgcccccgcgtacaagcagggccagaaccagctctataacgagctcaatctaggacgaagagaggagtacgatgttttggacaagagacgtggccgggaccctgagatggggggaaagccgagaaggaagaaccctcaggaaggcctgtacaatgaactgcagaaagataagatggcggaggcctacagtgagattgggatgaaaggcgagcgccggaggggcaaggggcacgatggcctttaccagggtctcagtacagccaccaaggacacctacgacgcccttcacatgcaggccctgccccctcgctgataa

SEQ ID NO: 737 - protein, 665 aa, Artificial Sequence
  CAR-T C2 FCHingeless Y407R/CD8/4-1BB/CD3z "FcH" CAR55
MALPVTALLLPLALLLHAARPEVQLVESGGGLVKPGGSLRLSCAASGFTFSGYAMSWVRQAPGKGLEWVSTISSGGTYIYYPDSVKGRFTISRDNAKNSLYLQMNSLRAEDTAVYYCARLGGDNYYEYFDVWGKGTTVTVSSGGGGSGGGGSGGGGSDIVLTQSPASLAVSPGQRATITCRASKSVSTSGYSYMHWYQQKPGQPPKLLIYLASNLESGVPARFSGSGSGTDFTLTINPVEANDTANYYCQHSRELPFTFGGGTKVEIKRTAPELLGGPSVFLFPPKPKDTLMISRTPEVTCVVVDVSHEDPEVKFNWYVDGVEVHNAKTKPREEQYNSTYRVVSVLTVLHQDWLNGKEYKCKVSNKALPAPIEKTISKAKGQPREPQVYTLPPSREEMTKNQVSLTCLVKGFYPSDIAVEWESNGQPENNYKTTPPVLDSDGSFFLRSKLTVDKSRWQQGNVFSCSVMHEALHNHYTQKSLSLSPGKIYIWAPLAGTCGVLLLSLVITLYCKRGRKKLLYIFKQPFMRPVQTTQEEDGCSCRFPEEEEGGCELRVKFSRSADAPAYKQGQNQLYNELNLGRREEYDVLDKRRGRDPEMGGKPRRKNPQEGLYNELQKDKMAEAYSEIGMKGERRRGKGHDGLYQGLSTATKDTYDALHMQALPPR

SEQ ID NO: 738 - DNA, 2175 bp, Artificial Sequence
  CAR-T C2 IgD/FCHingeless Y407R/CD8/4-1BB/CD3z "IgD FcH" CAR56
atggccttaccagtgaccgccttgctcctgccgctggccttgctgctccacgccgccaggccggaggtgcagctggtggagtctgggggaggcctggtcaagcctggggggtccctgagactctcctgtgcagcctctggattcaccttcagtggctatgccatgagctgggtccgccaggctccagggaaggggctggagtgggtctcaaccattagtagtggcggaacctacatatactaccccgactcagtgaagggccgattcaccatctccagagacaacgccaagaactcactgtatctgcaaatgaacagcctgagagccgaggacacggccgtgtattactgtgcgagacttgggggggataattactacgaatacttcgatgtctggggcaaagggaccacggtcaccgtctcctccggcggtggcggatccggcggtggcggatccggcggtggcggatccgacattgtgctgacccagtctccagcctccttggccgtgtctccaggacagagggccaccatcacctgcagagccagtaagagtgtcagtaccagcggatactcctacatgcactggtatcagcagaaaccaggacaacctcctaaactcctgatttacctggcatccaatctggagagcggggtcccagccaggttcagcggcagtgggtctgggaccgatttcaccctcacaattaatcctgtggaagctaatgatactgcaaattattactgtcagcacagtagggagctgcctttcacattcggcggagggaccaaggtggagatcaaacgaactgagtctccaaaggcacaggcctcctcagtgcccactgcacaaccccaagcagagggcagcctcgccaaggcaaccacagccccagccaccacccgtaacacaggaagaggcggcgaagagaagaaaaaggagaaggagaaagaggaacaagaagagagagagacaaagacaccagcacctgaactcctggggggaccgtcagtcttcctcttccccccaaaacccaaggacaccctcatgatctcccggacccctgaggtcacatgcgtggtggtggacgtgagccacgaagaccctgaggtcaagttcaactggtacgtggacggcgtggaggtgcataatgccaagacaaagccgcgggaggagcagtacaacagcacgtaccgtgtggtcagcgtcctcaccgtcctgcaccaggactggctgaatggcaaggagtacaagtgcaaggtctccaacaaagccctcccagcccccatcgagaaaaccatctccaaagccaaagggcagccccgagaaccacaggtgtacaccctgcccccatcccgggaggagatgaccaagaaccaggtcagcctgacctgcctggtcaaaggcttctatcccagcgacatcgccgtggagtgggagagcaatgggcagccggagaacaactacaagaccacgcctcccgtgctggactccgacggctccttcttcctcaggagcaagctcaccgtggacaagagcaggtggcagcaggggaacgtcttctcatgctccgtgatgcatgaggctctgcacaaccactacacgcagaagagcctctccctgtctccgggtaaaatctacatctgggcgcccttggccgggacttgtggggtccttctcctgtcactggttatcaccctttactgcaaacggggcagaaagaaactcctgtatatattcaaacaaccatttatgagaccagtacaaactactcaagaggaagatggctgtagctgccgatttccagaagaagaagaaggaggatgtgaactgagagtgaagttcagcaggagcgcagacgcccccgcgtacaagcagggccagaaccagctctataacgagctcaatctaggacgaagagaggagtacgatgttttggacaagagacgtggccgggaccctgagatggggggaaagccgagaaggaagaaccctcaggaaggcctgtacaatgaactgcagaaagataagatggcggaggcctacagtgagattgggatgaaaggcgagcgccggaggggcaaggggcacgatggcctttaccagggtctcagtacagccaccaaggacacctacgacgcccttcacatgcaggccctgccccctcgctgataa

SEQ ID NO: 739 - protein, 723 aa, Artificial Sequence
  CAR-T C2 IgD/FCHingeless Y407R/CD8/4-1BB/CD3z "IgD FcH" CAR56
MALPVTALLLPLALLLHAARPEVQLVESGGGLVKPGGSLRLSCAASGFTFSGYAMSWVRQAPGKGLEWVSTISSGGTYIYYPDSVKGRFTISRDNAKNSLYLQMNSLRAEDTAVYYCARLGGDNYYEYFDVWGKGTTVTVSSGGGGSGGGGSGGGGSDIVLTQSPASLAVSPGQRATITCRASKSVSTSGYSYMHWYQQKPGQPPKLLIYLASNLESGVPARFSGSGSGTDFTLTINPVEANDTANYYCQHSRELPFTFGGGTKVEIKRTESPKAQASSVPTAQPQAEGSLAKATTAPATTRNTGRGGEEKKKEKEKEEQEERETKTPAPELLGGPSVFLFPPKPKDTLMISRTPEVTCVVVDVSHEDPEVKFNWYVDGVEVHNAKTKPREEQYNSTYRVVSVLTVLHQDWLNGKEYKCKVSNKALPAPIEKTISKAKGQPREPQVYTLPPSREEMTKNQVSLTCLVKGFYPSDIAVEWESNGQPENNYKTTPPVLDSDGSFFLRSKLTVDKSRWQQGNVFSCSVMHEALHNHYTQKSLSLSPGKIYIWAPLAGTCGVLLLSLVITLYCKRGRKKLLYIFKQPFMRPVQTTQEEDGCSCRFPEEEEGGCELRVKFSRSADAPAYKQGQNQLYNELNLGRREEYDVLDKRRGRDPEMGGKPRRKNPQEGLYNELQKDKMAEAYSEIGMKGERRRGKGHDGLYQGLSTATKDTYDALHMQALPPR

SEQ ID NO: 740 - DNA, 1524 bp, Artificial Sequence
  CAR-T C2 IgD/CD8/4-1BB/CD3z "IgD" CAR57
atggccttaccagtgaccgccttgctcctgccgctggccttgctgctccacgccgccaggccggaggtgcagctggtggagtctgggggaggcctggtcaagcctggggggtccctgagactctcctgtgcagcctctggattcaccttcagtggctatgccatgagctgggtccgccaggctccagggaaggggctggagtgggtctcaaccattagtagtggcggaacctacatatactaccccgactcagtgaagggccgattcaccatctccagagacaacgccaagaactcactgtatctgcaaatgaacagcctgagagccgaggacacggccgtgtattactgtgcgagacttgggggggataattactacgaatacttcgatgtctggggcaaagggaccacggtcaccgtctcctccggcggtggcggatccggcggtggcggatccggcggtggcggatccgacattgtgctgacccagtctccagcctccttggccgtgtctccaggacagagggccaccatcacctgcagagccagtaagagtgtcagtaccagcggatactcctacatgcactggtatcagcagaaaccaggacaacctcctaaactcctgatttacctggcatccaatctggagagcggggtcccagccaggttcagcggcagtgggtctgggaccgatttcaccctcacaattaatcctgtggaagctaatgatactgcaaattattactgtcagcacagtagggagctgcctttcacattcggcggagggaccaaggtggagatcaaacgaactgagtctccaaaggcacaggcctcctcagtgcccactgcacaaccccaagcagagggcagcctcgccaaggcaaccacagccccagccaccacccgtaacacaggaagaggcggcgaagagaagaaaaaggagaaggagaaagaggaacaagaagagagagagacaaagacaccaatctacatctgggcgcccttggccgggacttgtggggtccttctcctgtcactggttatcaccctttactgcaaacggggcagaaagaaactcctgtatatattcaaacaaccatttatgagaccagtacaaactactcaagaggaagatggctgtagctgccgatttccagaagaagaagaaggaggatgtgaactgagagtgaagttcagcaggagcgcagacgcccccgcgtacaagcagggccagaaccagctctataacgagctcaatctaggacgaagagaggagtacgatgttttggacaagagacgtggccgggaccctgagatggggggaaagccgagaaggaagaaccctcaggaaggcctgtacaatgaactgcagaaagataagatggcggaggcctacagtgagattgggatgaaaggcgagcgccggaggggcaaggggcacgatggcctttaccagggtctcagtacagccaccaaggacacctacgacgcccttcacatgcaggccctgccccctcgctgataa

SEQ ID NO: 741 - protein, 506 aa, Artificial Sequence
  CAR-T C2 IgD/CD8/4-1BB/CD3z "IgD" CAR57
MALPVTALLLPLALLLHAARPEVQLVESGGGLVKPGGSLRLSCAASGFTFSGYAMSWVRQAPGKGLEWVSTISSGGTYIYYPDSVKGRFTISRDNAKNSLYLQMNSLRAEDTAVYYCARLGGDNYYEYFDVWGKGTTVTVSSGGGGSGGGGSGGGGSDIVLTQSPASLAVSPGQRATITCRASKSVSTSGYSYMHWYQQKPGQPPKLLIYLASNLESGVPARFSGSGSGTDFTLTINPVEANDTANYYCQHSRELPFTFGGGTKVEIKRTESPKAQASSVPTAQPQAEGSLAKATTAPATTRNTGRGGEEKKKEKEKEEQEERETKTPIYIWAPLAGTCGVLLLSLVITLYCKRGRKKLLYIFKQPFMRPVQTTQEEDGCSCRFPEEEEGGCELRVKFSRSADAPAYKQGQNQLYNELNLGRREEYDVLDKRRGRDPEMGGKPRRKNPQEGLYNELQKDKMAEAYSEIGMKGERRRGKGHDGLYQGLSTATKDTYDALHMQALPPR

SEQ ID NO: 742 - DNA, 1479 bp, Artificial Sequence
  CAR-T C2 X4/CD8/4-1BB/CD3z "X4" CAR58
atggccttaccagtgaccgccttgctcctgccgctggccttgctgctccacgccgccaggccggaggtgcagctggtggagtctgggggaggcctggtcaagcctggggggtccctgagactctcctgtgcagcctctggattcaccttcagtggctatgccatgagctgggtccgccaggctccagggaaggggctggagtgggtctcaaccattagtagtggcggaacctacatatactaccccgactcagtgaagggccgattcaccatctccagagacaacgccaagaactcactgtatctgcaaatgaacagcctgagagccgaggacacggccgtgtattactgtgcgagacttgggggggataattactacgaatacttcgatgtctggggcaaagggaccacggtcaccgtctcctccggcggtggcggatccggcggtggcggatccggcggtggcggatccgacattgtgctgacccagtctccagcctccttggccgtgtctccaggacagagggccaccatcacctgcagagccagtaagagtgtcagtaccagcggatactcctacatgcactggtatcagcagaaaccaggacaacctcctaaactcctgatttacctggcatccaatctggagagcggggtcccagccaggttcagcggcagtgggtctgggaccgatttcaccctcacaattaatcctgtggaagctaatgatactgcaaattattactgtcagcacagtagggagctgcctttcacattcggcggagggaccaaggtggagatcaaacgaactgacaagacgcacaccaagccacctaaaccagctccagaactgctcggaggtcctggcaccggaaccggaggacctaccatcaaaccacctaagccacctaagcctgctcctaacctgctcggaggacctatctacatctgggcgcccttggccgggacttgtggggtccttctcctgtcactggttatcaccctttactgcaaacggggcagaaagaaactcctgtatatattcaaacaaccatttatgagaccagtacaaactactcaagaggaagatggctgtagctgccgatttccagaagaagaagaaggaggatgtgaactgagagtgaagttcagcaggagcgcagacgcccccgcgtacaagcagggccagaaccagctctataacgagctcaatctaggacgaagagaggagtacgatgttttggacaagagacgtggccgggaccctgagatggggggaaagccgagaaggaagaaccctcaggaaggcctgtacaatgaactgcagaaagataagatggcggaggcctacagtgagattgggatgaaaggcgagcgccggaggggcaaggggcacgatggcctttaccagggtctcagtacagccaccaaggacacctacgacgcccttcacatgcaggccctgccccctcgctgataa

SEQ ID NO: 743 - protein, 491 aa, Artificial Sequence
  CAR-T C2 X4/CD8/4-1BB/CD3z "X4" CAR58
MALPVTALLLPLALLLHAARPEVQLVESGGGLVKPGGSLRLSCAASGFTFSGYAMSWVRQAPGKGLEWVSTISSGGTYIYYPDSVKGRFTISRDNAKNSLYLQMNSLRAEDTAVYYCARLGGDNYYEYFDVWGKGTTVTVSSGGGGSGGGGSGGGGSDIVLTQSPASLAVSPGQRATITCRASKSVSTSGYSYMHWYQQKPGQPPKLLIYLASNLESGVPARFSGSGSGTDFTLTINPVEANDTANYYCQHSRELPFTFGGGTKVEIKRTDKTHTKPPKPAPELLGGPGTGTGGPTIKPPKPPKPAPNLLGGPIYIWAPLAGTCGVLLLSLVITLYCKRGRKKLLYIFKQPFMRPVQTTQEEDGCSCRFPEEEEGGCELRVKFSRSADAPAYKQGQNQLYNELNLGRREEYDVLDKRRGRDPEMGGKPRRKNPQEGLYNELQKDKMAEAYSEIGMKGERRRGKGHDGLYQGLSTATKDTYDALHMQALPPR

SEQ ID NO: 744 - DNA, 1461 bp, Artificial Sequence; identical to SEQ ID NO: 336
  CAR-T E6 CD8/CD4/41BB/CD3z CAR37

SEQ ID NO: 745 - protein, 485 aa, Artificial Sequence; identical to SEQ ID NO: 337
  CAR-T E6 CD8/CD4/41BB/CD3z CAR37

SEQ ID NO: 746 - DNA, 1266 bp, Artificial Sequence
  CAR-T E6 CD4/CD4/CD3z sequence CAR23
atggccctgcccgtgaccgctttgctgctccccctggcgctgctgctgcacgccgccaggccagaggtccagctggttgagagtggcggtgggctggttaagcctggcggctccctgcggctgagctgcgccgcgagtggatttactttcagccgatatgggatgagttgggtgcggcaagctcccgggaagaggctggaatgggtctcaacaatctccggggggggcacttacatctattaccccgactcagtcaaggggagatttaccatttcacgagacaacgctaagaataccctgtatttgcagatgaattctctgagagcagaggacacagctgtttactattgtacccgcgacaactatggcaggaactacgactacggtatggactattggggacaagggacattggttacagtgagcagtggcggcgggggcagcggaggaggaggcagcggtggggggggcagcgagatagtgctcacgcagtcacccgcgactctcagtctctcacctggggaacgagctaccctgacgtgctctgctacctcctcagtgtcatatattcactggtatcagcaacggcccgggcagtcccctagattgctcatttatagtacctctaatctggcctcaggtatccctgcacgattttctggatctggttcaggttctgattacaccctcactatctctagcctggagcctgaagactttgccgtttattactgccagcagaggtctagctccccattcacctttgggagtgggaccaaggttgaaattaaatcgggacaggtcctgctggaatccaacatcaaggttctgcccacatggtccaccccggtgcagccaatggccctgattgtgctggggggcgtcgccggcctcctgcttttcattgggctaggcatcttcttccgcgttaagttctcccgatcagccgacgcgcctgcttacaagcagggccagaaccaactgtacaacgagctgaatctcggtagacgggaagagtacgacgtgttggacaaacggagaggccgcgacccagaaatgggcggcaagcctcgcaggaaaaacccccaggagggactgtacaatgagttgcagaaagataagatggcagaagcttatagcgagatcggaatgaagggggaaaggagacgagggaaaggacacgacggcctttatcagggcctgtccacagcaacaaaagatacgtatgacgccctccatatgcaggcacttccaccacggtgataa

SEQ ID NO: 747 - protein, 420 aa, Artificial Sequence
  CAR-T E6 CD4/CD4/CD3z sequence CAR23
MALPVTALLLPLALLLHAARPEVQLVESGGGLVKPGGSLRLSCAASGFTFSRYGMSWVRQAPGKRLEWVSTISGGGTYIYYPDSVKGRFTISRDNAKNTLYLQMNSLRAEDTAVYYCTRDNYGRNYDYGMDYWGQGTLVTVSSGGGGSGGGGSGGGGSEIVLTQSPATLSLSPGERATLTCSATSSVSYIHWYQQRPGQSPRLLIYSTSNLASGIPARFSGSGSGSDYTLTISSLEPEDFAVYYCQQRSSSPFTFGSGTKVEIKSGQVLLESNIKVLPTWSTPVQPMALIVLGGVAGLLLFIGLGIFFRVKFSRSADAPAYKQGQNQLYNELNLGRREEYDVLDKRRGRDPEMGGKPRRKNPQEGLYNELQKDKMAEAYSEIGMKGERRRGKGHDGLYQGLSTATKDTYDALHMQALPPR

SEQ ID NO: 748 - DNA, 1389 bp, Artificial Sequence
  CAR-T E6 CD4/CD4/CD28/CD3z sequence CAR25
atggccctgcccgtgaccgctttgctgctccccctggcgctgctgctgcacgccgccaggccagaggtccagctggttgagagtggcggtgggctggttaagcctggcggctccctgcggctgagctgcgccgcgagtggatttactttcagccgatatgggatgagttgggtgcggcaagctcccgggaagaggctggaatgggtctcaacaatctccggggggggcacttacatctattaccccgactcagtcaaggggagatttaccatttcacgagacaacgctaagaataccctgtatttgcagatgaattctctgagagcagaggacacagctgtttactattgtacccgcgacaactatggcaggaactacgactacggtatggactattggggacaagggacattggttacagtgagcagtggcggcgggggcagcggaggaggaggcagcggtggggggggcagcgagatagtgctcacgcagtcacccgcgactctcagtctctcacctggggaacgagctaccctgacgtgctctgctacctcctcagtgtcatatattcactggtatcagcaacggcccgggcagtcccctagattgctcatttatagtacctctaatctggcctcaggtatccctgcacgattttctggatctggttcaggttctgattacaccctcactatctctagcctggagcctgaagactttgccgtttattactgccagcagaggtctagctccccattcacctttgggagtgggaccaaggttgaaattaaatcgggacaggtcctgctggaatccaacatcaaggttctgcccacatggtccaccccggtgcagccaatggccctgattgtgctggggggcgtcgccggcctcctgcttttcattgggctaggcatcttcttcagaagcaagcggtctcggctcctgcattctgattacatgaacatgaccccaagaagaccaggccccaccaggaaacattaccagccctacgctccgccacgcgacttcgctgcctaccggtcccgcgttaagttctcccgatcagccgacgcgcctgcttacaagcagggccagaaccaactgtacaacgagctgaatctcggtagacgggaagagtacgacgtgttggacaaacggagaggccgcgacccagaaatgggcggcaagcctcgcaggaaaaacccccaggagggactgtacaatgagttgcagaaagataagatggcagaagcttatagcgagatcggaatgaagggggaaaggagacgagggaaaggacacgacggcctttatcagggcctgtccacagcaacaaaagatacgtatgacgccctccatatgcaggcacttccaccacggtgataa

SEQ ID NO: 749 - protein, 461 aa, Artificial Sequence
  CAR-T E6 CD4/CD4/CD28/CD3z sequence CAR25
MALPVTALLLPLALLLHAARPEVQLVESGGGLVKPGGSLRLSCAASGFTFSRYGMSWVRQAPGKRLEWVSTISGGGTYIYYPDSVKGRFTISRDNAKNTLYLQMNSLRAEDTAVYYCTRDNYGRNYDYGMDYWGQGTLVTVSSGGGGSGGGGSGGGGSEIVLTQSPATLSLSPGERATLTCSATSSVSYIHWYQQRPGQSPRLLIYSTSNLASGIPARFSGSGSGSDYTLTISSLEPEDFAVYYCQQRSSSPFTFGSGTKVEIKSGQVLLESNIKVLPTWSTPVQPMALIVLGGVAGLLLFIGLGIFFRSKRSRLLHSDYMNMTPRRPGPTRKHYQPYAPPRDFAAYRSRVKFSRSADAPAYKQGQNQLYNELNLGRREEYDVLDKRRGRDPEMGGKPRRKNPQEGLYNELQKDKMAEAYSEIGMKGERRRGKGHDGLYQGLSTATKDTYDALHMQALPPR

SEQ ID NO: 750 - DNA, 1392 bp, Artificial Sequence
  CAR-T E6 CD4/CD4/4-1BB/CD3z sequence CAR31
atggccctgcccgtgaccgctttgctgctccccctggcgctgctgctgcacgccgccaggccagaggtccagctggttgagagtggcggtgggctggttaagcctggcggctccctgcggctgagctgcgccgcgagtggatttactttcagccgatatgggatgagttgggtgcggcaagctcccgggaagaggctggaatgggtctcaacaatctccggggggggcacttacatctattaccccgactcagtcaaggggagatttaccatttcacgagacaacgctaagaataccctgtatttgcagatgaattctctgagagcagaggacacagctgtttactattgtacccgcgacaactatggcaggaactacgactacggtatggactattggggacaagggacattggttacagtgagcagtggcggcgggggcagcggaggaggaggcagcggtggggggggcagcgagatagtgctcacgcagtcacccgcgactctcagtctctcacctggggaacgagctaccctgacgtgctctgctacctcctcagtgtcatatattcactggtatcagcaacggcccgggcagtcccctagattgctcatttatagtacctctaatctggcctcaggtatccctgcacgattttctggatctggttcaggttctgattacaccctcactatctctagcctggagcctgaagactttgccgtttattactgccagcagaggtctagctccccattcacctttgggagtgggaccaaggttgaaattaaatcgggacaggtcctgctggaatccaacatcaaggttctgcccacatggtccaccccggtgcagccaatggccctgattgtgctggggggcgtcgccggcctcctgcttttcattgggctaggcatcttcttcaaaaggggccgcaaaaaactcctttacatttttaagcagccttttatgaggccagtacagacgactcaagaggaagacgggtgctcatgccgctttcctgaggaggaggaaggagggtgcgaactgcgcgttaagttctcccgatcagccgacgcgcctgcttacaagcagggccagaaccaactgtacaacgagctgaatctcggtagacgggaagagtacgacgtgttggacaaacggagaggccgcgacccagaaatgggcggcaagcctcgcaggaaaaacccccaggagggactgtacaatgagttgcagaaagataagatggcagaagcttatagcgagatcggaatgaagggggaaaggagacgagggaaaggacacgacggcctttatcagggcctgtccacagcaacaaaagatacgtatgacgccctccatatgcaggcacttccaccacggtgataa

SEQ ID NO: 751 - protein, 462 aa, Artificial Sequence
  CAR-T E6 CD4/CD4/4-1BB/CD3z sequence CAR31
MALPVTALLLPLALLLHAARPEVQLVESGGGLVKPGGSLRLSCAASGFTFSRYGMSWVRQAPGKRLEWVSTISGGGTYIYYPDSVKGRFTISRDNAKNTLYLQMNSLRAEDTAVYYCTRDNYGRNYDYGMDYWGQGTLVTVSSGGGGSGGGGSGGGGSEIVLTQSPATLSLSPGERATLTCSATSSVSYIHWYQQRPGQSPRLLIYSTSNLASGIPARFSGSGSGSDYTLTISSLEPEDFAVYYCQQRSSSPFTFGSGTKVEIKSGQVLLESNIKVLPTWSTPVQPMALIVLGGVAGLLLFIGLGIFFKRGRKKLLYIFKQPFMRPVQTTQEEDGCSCRFPEEEEGGCELRVKFSRSADAPAYKQGQNQLYNELNLGRREEYDVLDKRRGRDPEMGGKPRRKNPQEGLYNELQKDKMAEAYSEIGMKGERRRGKGHDGLYQGLSTATKDTYDALHMQALPPR

SEQ ID NO: 752 - DNA, 1377 bp, Artificial Sequence
  CAR-T E6 CD4/CD4/OX40/CD3z sequence
atggccctgcccgtgaccgctttgctgctccccctggcgctgctgctgcacgccgccaggccagaggtccagctggttgagagtggcggtgggctggttaagcctggcggctccctgcggctgagctgcgccgcgagtggatttactttcagccgatatgggatgagttgggtgcggcaagctcccgggaagaggctggaatgggtctcaacaatctccggggggggcacttacatctattaccccgactcagtcaaggggagatttaccatttcacgagacaacgctaagaataccctgtatttgcagatgaattctctgagagcagaggacacagctgtttactattgtacccgcgacaactatggcaggaactacgactacggtatggactattggggacaagggacattggttacagtgagcagtggcggcgggggcagcggaggaggaggcagcggtggggggggcagcgagatagtgctcacgcagtcacccgcgactctcagtctctcacctggggaacgagctaccctgacgtgctctgctacctcctcagtgtcatatattcactggtatcagcaacggcccgggcagtcccctagattgctcatttatagtacctctaatctggcctcaggtatccctgcacgattttctggatctggttcaggttctgattacaccctcactatctctagcctggagcctgaagactttgccgtttattactgccagcagaggtctagctccccattcacctttgggagtgggaccaaggttgaaattaaatcgggacaggtcctgctggaatccaacatcaaggttctgcccacatggtccaccccggtgcagccaatggccctgattgtgctggggggcgtcgccggcctcctgcttttcattgggctaggcatcttcttccggagggaccagaggctgccccccgatgcccacaagccccctgggggaggcagtttccggacccccatccaagaggagcaggccgacgcccactccaccctggccaagatccgcgttaagttctcccgatcagccgacgcgcctgcttacaagcagggccagaaccaactgtacaacgagctgaatctcggtagacgggaagagtacgacgtgttggacaaacggagaggccgcgacccagaaatgggcggcaagcctcgcaggaaaaacccccaggagggactgtacaatgagttgcagaaagataagatggcagaagcttatagcgagatcggaatgaagggggaaaggagacgagggaaaggacacgacggcctttatcagggcctgtccacagcaacaaaagatacgtatgacgccctccatatgcaggcacttccaccacggtgataa

SEQ ID NO: 753 - protein, 457 aa, Artificial Sequence
  CAR-T E6 CD4/CD4/OX40/CD3z sequence
MALPVTALLLPLALLLHAARPEVQLVESGGGLVKPGGSLRLSCAASGFTFSRYGMSWVRQAPGKRLEWVSTISGGGTYIYYPDSVKGRFTISRDNAKNTLYLQMNSLRAEDTAVYYCTRDNYGRNYDYGMDYWGQGTLVTVSSGGGGSGGGGSGGGGSEIVLTQSPATLSLSPGERATLTCSATSSVSYIHWYQQRPGQSPRLLIYSTSNLASGIPARFSGSGSGSDYTLTISSLEPEDFAVYYCQQRSSSPFTFGSGTKVEIKSGQVLLESNIKVLPTWSTPVQPMALIVLGGVAGLLLFIGLGIFFRRDQRLPPDAHKPPGGGSFRTPIQEEQADAHSTLAKIRVKFSRSADAPAYKQGQNQLYNELNLGRREEYDVLDKRRGRDPEMGGKPRRKNPQEGLYNELQKDKMAEAYSEIGMKGERRRGKGHDGLYQGLSTATKDTYDALHMQALPPR

SEQ ID NO: 754 - DNA, 1515 bp, Artificial Sequence
  CAR-T E6 CD4/CD4/CD28/4-1BB/CD3z sequence CAR38
atggccctgcccgtgaccgctttgctgctccccctggcgctgctgctgcacgccgccaggccagaggtccagctggttgagagtggcggtgggctggttaagcctggcggctccctgcggctgagctgcgccgcgagtggatttactttcagccgatatgggatgagttgggtgcggcaagctcccgggaagaggctggaatgggtctcaacaatctccggggggggcacttacatctattaccccgactcagtcaaggggagatttaccatttcacgagacaacgctaagaataccctgtatttgcagatgaattctctgagagcagaggacacagctgtttactattgtacccgcgacaactatggcaggaactacgactacggtatggactattggggacaagggacattggttacagtgagcagtggcggcgggggcagcggaggaggaggcagcggtggggggggcagcgagatagtgctcacgcagtcacccgcgactctcagtctctcacctggggaacgagctaccctgacgtgctctgctacctcctcagtgtcatatattcactggtatcagcaacggcccgggcagtcccctagattgctcatttatagtacctctaatctggcctcaggtatccctgcacgattttctggatctggttcaggttctgattacaccctcactatctctagcctggagcctgaagactttgccgtttattactgccagcagaggtctagctccccattcacctttgggagtgggaccaaggttgaaattaaatcgggacaggtcctgctggaatccaacatcaaggttctgcccacatggtccaccccggtgcagccaatggccctgattgtgctggggggcgtcgccggcctcctgcttttcattgggctaggcatcttcttcagaagcaagcggtctcggctcctgcattctgattacatgaacatgaccccaagaagaccaggccccaccaggaaacattaccagccctacgctccgccacgcgacttcgctgcctaccggtccaaaaggggccgcaaaaaactcctttacatttttaagcagccttttatgaggccagtacagacgactcaagaggaagacgggtgctcatgccgctttcctgaggaggaggaaggagggtgcgaactgcgcgttaagttctcccgatcagccgacgcgcctgcttacaagcagggccagaaccaactgtacaacgagctgaatctcggtagacgggaagagtacgacgtgttggacaaacggagaggccgcgacccagaaatgggcggcaagcctcgcaggaaaaacccccaggagggactgtacaatgagttgcagaaagataagatggcagaagcttatagcgagatcggaatgaagggggaaaggagacgagggaaaggacacgacggcctttatcagggcctgtccacagcaacaaaagatacgtatgacgccctccatatgcaggcacttccaccacggtgataa

SEQ ID NO: 755 - protein, 503 aa, Artificial Sequence
  CAR-T E6 CD4/CD4/CD28/4-1BB/CD3z sequence CAR38
MALPVTALLLPLALLLHAARPEVQLVESGGGLVKPGGSLRLSCAASGFTFSRYGMSWVRQAPGKRLEWVSTISGGGTYIYYPDSVKGRFTISRDNAKNTLYLQMNSLRAEDTAVYYCTRDNYGRNYDYGMDYWGQGTLVTVSSGGGGSGGGGSGGGGSEIVLTQSPATLSLSPGERATLTCSATSSVSYIHWYQQRPGQSPRLLIYSTSNLASGIPARFSGSGSGSDYTLTISSLEPEDFAVYYCQQRSSSPFTFGSGTKVEIKSGQVLLESNIKVLPTWSTPVQPMALIVLGGVAGLLLFIGLGIFFRSKRSRLLHSDYMNMTPRRPGPTRKHYQPYAPPRDFAAYRSKRGRKKLLYIFKQPFMRPVQTTQEEDGCSCRFPEEEEGGCELRVKFSRSADAPAYKQGQNQLYNELNLGRREEYDVLDKRRGRDPEMGGKPRRKNPQEGLYNELQKDKMAEAYSEIGMKGERRRGKGHDGLYQGLSTATKDTYDALHMQALPPR

SEQ ID NO: 756 - DNA, 1500 bp, Artificial Sequence
  CAR-T E6 CD4/CD4/CD28/OX40/CD3z sequence
atggccctgcccgtgaccgctttgctgctccccctggcgctgctgctgcacgccgccaggccagaggtccagctggttgagagtggcggtgggctggttaagcctggcggctccctgcggctgagctgcgccgcgagtggatttactttcagccgatatgggatgagttgggtgcggcaagctcccgggaagaggctggaatgggtctcaacaatctccggggggggcacttacatctattaccccgactcagtcaaggggagatttaccatttcacgagacaacgctaagaataccctgtatttgcagatgaattctctgagagcagaggacacagctgtttactattgtacccgcgacaactatggcaggaactacgactacggtatggactattggggacaagggacattggttacagtgagcagtggcggcgggggcagcggaggaggaggcagcggtggggggggcagcgagatagtgctcacgcagtcacccgcgactctcagtctctcacctggggaacgagctaccctgacgtgctctgctacctcctcagtgtcatatattcactggtatcagcaacggcccgggcagtcccctagattgctcatttatagtacctctaatctggcctcaggtatccctgcacgattttctggatctggttcaggttctgattacaccctcactatctctagcctggagcctgaagactttgccgtttattactgccagcagaggtctagctccccattcacctttgggagtgggaccaaggttgaaattaaatcgggacaggtcctgctggaatccaacatcaaggttctgcccacatggtccaccccggtgcagccaatggccctgattgtgctggggggcgtcgccggcctcctgcttttcattgggctaggcatcttcttcagaagcaagcggtctcggctcctgcattctgattacatgaacatgaccccaagaagaccaggccccaccaggaaacattaccagccctacgctccgccacgcgacttcgctgcctaccggtcccggagggaccagaggctgccccccgatgcccacaagccccctgggggaggcagtttccggacccccatccaagaggagcaggccgacgcccactccaccctggccaagatccgcgttaagttctcccgatcagccgacgcgcctgcttacaagcagggccagaaccaactgtacaacgagctgaatctcggtagacgggaagagtacgacgtgttggacaaacggagaggccgcgacccagaaatgggcggcaagcctcgcaggaaaaacccccaggagggactgtacaatgagttgcagaaagataagatggcagaagcttatagcgagatcggaatgaagggggaaaggagacgagggaaaggacacgacggcctttatcagggcctgtccacagcaacaaaagatacgtatgacgccctccatatgcaggcacttccaccacggtgataa

SEQ ID NO: 757 - protein, 498 aa, Artificial Sequence
  CAR-T E6 CD4/CD4/CD28/OX40/CD3z sequence
MALPVTALLLPLALLLHAARPEVQLVESGGGLVKPGGSLRLSCAASGFTFSRYGMSWVRQAPGKRLEWVSTISGGGTYIYYPDSVKGRFTISRDNAKNTLYLQMNSLRAEDTAVYYCTRDNYGRNYDYGMDYWGQGTLVTVSSGGGGSGGGGSGGGGSEIVLTQSPATLSLSPGERATLTCSATSSVSYIHWYQQRPGQSPRLLIYSTSNLASGIPARFSGSGSGSDYTLTISSLEPEDFAVYYCQQRSSSPFTFGSGTKVEIKSGQVLLESNIKVLPTWSTPVQPMALIVLGGVAGLLLFIGLGIFFRSKRSRLLHSDYMNMTPRRPGPTRKHYQPYAPPRDFAAYRSRRDQRLPPDAHKPPGGGSFRTPIQEEQADAHSTLAKIRVKFSRSADAPAYKQGQNQLYNELNLGRREEYDVLDKRRGRDPEMGGKPRRKNPQEGLYNELQKDKMAEAYSEIGMKGERRRGKGHDGLYQGLSTATKDTYDALHMQALPPR

SEQ ID NO: 758 - DNA, 1284 bp, Artificial Sequence
  CAR-T C2 CD4/CD4/CD3z sequence: CAR59
atggccttgccagtgacggccctgctgctgccattggctcttctgttgcacgctgccaggcctgaagtgcagctcgtagagagtggcgggggactggtgaagcccggtggaagcctcagactcagttgcgccgcctcaggtttcactttttcaggttacgccatgtcctgggtaagacaggcaccggggaaaggactcgagtgggtgtctactatcagctcaggaggcacttatatatattatcctgactctgtaaaaggccgatttacgatttctcgcgacaatgcaaagaactccctctacctccaaatgaacagtcttagggcagaagacactgctgtatactattgtgcacgcctcggcggcgacaactactacgagtactttgacgtgtgggggaaagggactaccgtgacagtttcaagcggaggaggtggctcaggtggaggcgggtcaggggggggaggaagtgatattgtgctcacacaatccccagcctccctggctgtgtctcccggccaacgcgctacaattacatgtcgggcctccaaaagcgtgagcaccagcggctacagctacatgcactggtatcaacagaaaccaggacaaccccccaaactgttgatttatctcgcttcaaacttggagtccggcgtgcctgcgcgcttttcagggagtgggagcggcacagattttacgctgactatcaaccccgtagaagcaaacgatacagcgaattattattgtcaacattcccgggaactcccctttacgttcggcgggggcacaaaggtcgaaattaagagaacctcgggacaggtcctgctggaatccaacatcaaggttctgcccacatggtccaccccggtgcagccaatggccctgattgtgctggggggcgtcgccggcctcctgcttttcattgggctaggcatcttcttccgcgttaagttctcccgatcagccgacgcgcctgcttacaagcagggccagaaccaactgtacaacgagctgaatctcggtagacgggaagagtacgacgtgttggacaaacggagaggccgcgacccagaaatgggcggcaagcctcgcaggaaaaacccccaggagggactgtacaatgagttgcagaaagataagatggcagaagcttatagcgagatcggaatgaagggggaaaggagacgagggaaaggacacgacggcctttatcagggcctgtccacagcaacaaaagatacgtatgacgccctccatatgcaggcacttccaccacggtgataa

SEQ ID NO: 759 - protein, 426 aa, Artificial Sequence
  CAR-T C2 CD4/CD4/CD3z sequence: CAR59
MALPVTALLLPLALLLHAARPEVQLVESGGGLVKPGGSLRLSCAASGFTFSGYAMSWVRQAPGKGLEWVSTISSGGTYIYYPDSVKGRFTISRDNAKNSLYLQMNSLRAEDTAVYYCARLGGDNYYEYFDVWGKGTTVTVSSGGGGSGGGGSGGGGSDIVLTQSPASLAVSPGQRATITCRASKSVSTSGYSYMHWYQQKPGQPPKLLIYLASNLESGVPARFSGSGSGTDFTLTINPVEANDTANYYCQHSRELPFTFGGGTKVEIKRTSGQVLLESNIKVLPTWSTPVQPMALIVLGGVAGLLLFIGLGIFFRVKFSRSADAPAYKQGQNQLYNELNLGRREEYDVLDKRRGRDPEMGGKPRRKNPQEGLYNELQKDKMAEAYSEIGMKGERRRGKGHDGLYQGLSTATKDTYDALHMQALPPR

SEQ ID NO: 760 - DNA, 1407 bp, Artificial Sequence
  CAR-T C2 CD4/CD4/CD28/CD3z sequence: CAR60
atggccttgccagtgacggccctgctgctgccattggctcttctgttgcacgctgccaggcctgaagtgcagctcgtagagagtggcgggggactggtgaagcccggtggaagcctcagactcagttgcgccgcctcaggtttcactttttcaggttacgccatgtcctgggtaagacaggcaccggggaaaggactcgagtgggtgtctactatcagctcaggaggcacttatatatattatcctgactctgtaaaaggccgatttacgatttctcgcgacaatgcaaagaactccctctacctccaaatgaacagtcttagggcagaagacactgctgtatactattgtgcacgcctcggcggcgacaactactacgagtactttgacgtgtgggggaaagggactaccgtgacagtttcaagcggaggaggtggctcaggtggaggcgggtcaggggggggaggaagtgatattgtgctcacacaatccccagcctccctggctgtgtctcccggccaacgcgctacaattacatgtcgggcctccaaaagcgtgagcaccagcggctacagctacatgcactggtatcaacagaaaccaggacaaccccccaaactgttgatttatctcgcttcaaacttggagtccggcgtgcctgcgcgcttttcagggagtgggagcggcacagattttacgctgactatcaaccccgtagaagcaaacgatacagcgaattattattgtcaacattcccgggaactcccctttacgttcggcgggggcacaaaggtcgaaattaagagaacctcgggacaggtcctgctggaatccaacatcaaggttctgcccacatggtccaccccggtgcagccaatggccctgattgtgctggggggcgtcgccggcctcctgcttttcattgggctaggcatcttcttcagaagcaagcggtctcggctcctgcattctgattacatgaacatgaccccaagaagaccaggccccaccaggaaacattaccagccctacgctccgccacgcgacttcgctgcctaccggtcccgcgttaagttctcccgatcagccgacgcgcctgcttacaagcagggccagaaccaactgtacaacgagctgaatctcggtagacgggaagagtacgacgtgttggacaaacggagaggccgcgacccagaaatgggcggcaagcctcgcaggaaaaacccccaggagggactgtacaatgagttgcagaaagataagatggcagaagcttatagcgagatcggaatgaagggggaaaggagacgagggaaaggacacgacggcctttatcagggcctgtccacagcaacaaaagatacgtatgacgccctccatatgcaggcacttccaccacggtgataa

SEQ ID NO: 761 - protein, 467 aa, Artificial Sequence
  CAR-T C2 CD4/CD4/CD28/CD3z sequence: CAR60
MALPVTALLLPLALLLHAARPEVQLVESGGGLVKPGGSLRLSCAASGFTFSGYAMSWVRQAPGKGLEWVSTISSGGTYIYYPDSVKGRFTISRDNAKNSLYLQMNSLRAEDTAVYYCARLGGDNYYEYFDVWGKGTTVTVSSGGGGSGGGGSGGGGSDIVLTQSPASLAVSPGQRATITCRASKSVSTSGYSYMHWYQQKPGQPPKLLIYLASNLESGVPARFSGSGSGTDFTLTINPVEANDTANYYCQHSRELPFTFGGGTKVEIKRTSGQVLLESNIKVLPTWSTPVQPMALIVLGGVAGLLLFIGLGIFFRSKRSRLLHSDYMNMTPRRPGPTRKHYQPYAPPRDFAAYRSRVKFSRSADAPAYKQGQNQLYNELNLGRREEYDVLDKRRGRDPEMGGKPRRKNPQEGLYNELQKDKMAEAYSEIGMKGERRRGKGHDGLYQGLSTATKDTYDALHMQALPPR

SEQ ID NO: 762 - DNA, 1410 bp, Artificial Sequence
  CAR-T C2 CD4/CD4/4-1BB/CD3z sequence:CAR61
atggccttgccagtgacggccctgctgctgccattggctcttctgttgcacgctgccaggcctgaagtgcagctcgtagagagtggcgggggactggtgaagcccggtggaagcctcagactcagttgcgccgcctcaggtttcactttttcaggttacgccatgtcctgggtaagacaggcaccggggaaaggactcgagtgggtgtctactatcagctcaggaggcacttatatatattatcctgactctgtaaaaggccgatttacgatttctcgcgacaatgcaaagaactccctctacctccaaatgaacagtcttagggcagaagacactgctgtatactattgtgcacgcctcggcggcgacaactactacgagtactttgacgtgtgggggaaagggactaccgtgacagtttcaagcggaggaggtggctcaggtggaggcgggtcaggggggggaggaagtgatattgtgctcacacaatccccagcctccctggctgtgtctcccggccaacgcgctacaattacatgtcgggcctccaaaagcgtgagcaccagcggctacagctacatgcactggtatcaacagaaaccaggacaaccccccaaactgttgatttatctcgcttcaaacttggagtccggcgtgcctgcgcgcttttcagggagtgggagcggcacagattttacgctgactatcaaccccgtagaagcaaacgatacagcgaattattattgtcaacattcccgggaactcccctttacgttcggcgggggcacaaaggtcgaaattaagagaacctcgggacaggtcctgctggaatccaacatcaaggttctgcccacatggtccaccccggtgcagccaatggccctgattgtgctggggggcgtcgccggcctcctgcttttcattgggctaggcatcttcttcaaaaggggccgcaaaaaactcctttacatttttaagcagccttttatgaggccagtacagacgactcaagaggaagacgggtgctcatgccgctttcctgaggaggaggaaggagggtgcgaactgcgcgttaagttctcccgatcagccgacgcgcctgcttacaagcagggccagaaccaactgtacaacgagctgaatctcggtagacgggaagagtacgacgtgttggacaaacggagaggccgcgacccagaaatgggcggcaagcctcgcaggaaaaacccccaggagggactgtacaatgagttgcagaaagataagatggcagaagcttatagcgagatcggaatgaagggggaaaggagacgagggaaaggacacgacggcctttatcagggcctgtccacagcaacaaaagatacgtatgacgccctccatatgcaggcacttccaccacggtgataa

SEQ ID NO: 763 - protein, 468 aa, Artificial Sequence; identical to SEQ ID NO: 731
  CAR-T C2 CD4/CD4/4-1BB/CD3z sequence:CAR61

SEQ ID NO: 764 - DNA, 1395 bp, Artificial Sequence
  CAR-T C2 CD4/CD4/OX40/CD3z sequence:
atggccttgccagtgacggccctgctgctgccattggctcttctgttgcacgctgccaggcctgaagtgcagctcgtagagagtggcgggggactggtgaagcccggtggaagcctcagactcagttgcgccgcctcaggtttcactttttcaggttacgccatgtcctgggtaagacaggcaccggggaaaggactcgagtgggtgtctactatcagctcaggaggcacttatatatattatcctgactctgtaaaaggccgatttacgatttctcgcgacaatgcaaagaactccctctacctccaaatgaacagtcttagggcagaagacactgctgtatactattgtgcacgcctcggcggcgacaactactacgagtactttgacgtgtgggggaaagggactaccgtgacagtttcaagcggaggaggtggctcaggtggaggcgggtcaggggggggaggaagtgatattgtgctcacacaatccccagcctccctggctgtgtctcccggccaacgcgctacaattacatgtcgggcctccaaaagcgtgagcaccagcggctacagctacatgcactggtatcaacagaaaccaggacaaccccccaaactgttgatttatctcgcttcaaacttggagtccggcgtgcctgcgcgcttttcagggagtgggagcggcacagattttacgctgactatcaaccccgtagaagcaaacgatacagcgaattattattgtcaacattcccgggaactcccctttacgttcggcgggggcacaaaggtcgaaattaagagaacctcgggacaggtcctgctggaatccaacatcaaggttctgcccacatggtccaccccggtgcagccaatggccctgattgtgctggggggcgtcgccggcctcctgcttttcattgggctaggcatcttcttccggagggaccagaggctgccccccgatgcccacaagccccctgggggaggcagtttccggacccccatccaagaggagcaggccgacgcccactccaccctggccaagatccgcgttaagttctcccgatcagccgacgcgcctgcttacaagcagggccagaaccaactgtacaacgagctgaatctcggtagacgggaagagtacgacgtgttggacaaacggagaggccgcgacccagaaatgggcggcaagcctcgcaggaaaaacccccaggagggactgtacaatgagttgcagaaagataagatggcagaagcttatagcgagatcggaatgaagggggaaaggagacgagggaaaggacacgacggcctttatcagggcctgtccacagcaacaaaagatacgtatgacgccctccatatgcaggcacttccaccacggtgataa

SEQ ID NO: 765 - protein, 463 aa, Artificial Sequence
  CAR-T C2 CD4/CD4/OX40/CD3z sequence
MALPVTALLLPLALLLHAARPEVQLVESGGGLVKPGGSLRLSCAASGFTFSGYAMSWVRQAPGKGLEWVSTISSGGTYIYYPDSVKGRFTISRDNAKNSLYLQMNSLRAEDTAVYYCARLGGDNYYEYFDVWGKGTTVTVSSGGGGSGGGGSGGGGSDIVLTQSPASLAVSPGQRATITCRASKSVSTSGYSYMHWYQQKPGQPPKLLIYLASNLESGVPARFSGSGSGTDFTLTINPVEANDTANYYCQHSRELPFTFGGGTKVEIKRTSGQVLLESNIKVLPTWSTPVQPMALIVLGGVAGLLLFIGLGIFFRRDQRLPPDAHKPPGGGSFRTPIQEEQADAHSTLAKIRVKFSRSADAPAYKQGQNQLYNELNLGRREEYDVLDKRRGRDPEMGGKPRRKNPQEGLYNELQKDKMAEAYSEIGMKGERRRGKGHDGLYQGLSTATKDTYDALHMQALPPR

SEQ ID NO: 766 - DNA, 1533 bp, Artificial Sequence
  CAR-T C2 CD4/CD4/CD28/4-1BB/CD3z sequence: CAR62
atggccttgccagtgacggccctgctgctgccattggctcttctgttgcacgctgccaggcctgaagtgcagctcgtagagagtggcgggggactggtgaagcccggtggaagcctcagactcagttgcgccgcctcaggtttcactttttcaggttacgccatgtcctgggtaagacaggcaccggggaaaggactcgagtgggtgtctactatcagctcaggaggcacttatatatattatcctgactctgtaaaaggccgatttacgatttctcgcgacaatgcaaagaactccctctacctccaaatgaacagtcttagggcagaagacactgctgtatactattgtgcacgcctcggcggcgacaactactacgagtactttgacgtgtgggggaaagggactaccgtgacagtttcaagcggaggaggtggctcaggtggaggcgggtcaggggggggaggaagtgatattgtgctcacacaatccccagcctccctggctgtgtctcccggccaacgcgctacaattacatgtcgggcctccaaaagcgtgagcaccagcggctacagctacatgcactggtatcaacagaaaccaggacaaccccccaaactgttgatttatctcgcttcaaacttggagtccggcgtgcctgcgcgcttttcagggagtgggagcggcacagattttacgctgactatcaaccccgtagaagcaaacgatacagcgaattattattgtcaacattcccgggaactcccctttacgttcggcgggggcacaaaggtcgaaattaagagaacctcgggacaggtcctgctggaatccaacatcaaggttctgcccacatggtccaccccggtgcagccaatggccctgattgtgctggggggcgtcgccggcctcctgcttttcattgggctaggcatcttcttcagaagcaagcggtctcggctcctgcattctgattacatgaacatgaccccaagaagaccaggccccaccaggaaacattaccagccctacgctccgccacgcgacttcgctgcctaccggtccaaaaggggccgcaaaaaactcctttacatttttaagcagccttttatgaggccagtacagacgactcaagaggaagacgggtgctcatgccgctttcctgaggaggaggaaggagggtgcgaactgcgcgttaagttctcccgatcagccgacgcgcctgcttacaagcagggccagaaccaactgtacaacgagctgaatctcggtagacgggaagagtacgacgtgttggacaaacggagaggccgcgacccagaaatgggcggcaagcctcgcaggaaaaacccccaggagggactgtacaatgagttgcagaaagataagatggcagaagcttatagcgagatcggaatgaagggggaaaggagacgagggaaaggacacgacggcctttatcagggcctgtccacagcaacaaaagatacgtatgacgccctccatatgcaggcacttccaccacggtgataa

SEQ ID NO: 767 - protein, 509 aa, Artificial Sequence
  CAR-T C2 CD4/CD4/CD28/4-1BB/CD3z sequence: CAR62
MALPVTALLLPLALLLHAARPEVQLVESGGGLVKPGGSLRLSCAASGFTFSGYAMSWVRQAPGKGLEWVSTISSGGTYIYYPDSVKGRFTISRDNAKNSLYLQMNSLRAEDTAVYYCARLGGDNYYEYFDVWGKGTTVTVSSGGGGSGGGGSGGGGSDIVLTQSPASLAVSPGQRATITCRASKSVSTSGYSYMHWYQQKPGQPPKLLIYLASNLESGVPARFSGSGSGTDFTLTINPVEANDTANYYCQHSRELPFTFGGGTKVEIKRTSGQVLLESNIKVLPTWSTPVQPMALIVLGGVAGLLLFIGLGIFFRSKRSRLLHSDYMNMTPRRPGPTRKHYQPYAPPRDFAAYRSKRGRKKLLYIFKQPFMRPVQTTQEEDGCSCRFPEEEEGGCELRVKFSRSADAPAYKQGQNQLYNELNLGRREEYDVLDKRRGRDPEMGGKPRRKNPQEGLYNELQKDKMAEAYSEIGMKGERRRGKGHDGLYQGLSTATKDTYDALHMQALPPR

SEQ ID NO: 768 - DNA, 1518 bp, Artificial Sequence
  CAR-T C2 CD4/CD4/CD28/OX40/CD3z sequence
atggccttgccagtgacggccctgctgctgccattggctcttctgttgcacgctgccaggcctgaagtgcagctcgtagagagtggcgggggactggtgaagcccggtggaagcctcagactcagttgcgccgcctcaggtttcactttttcaggttacgccatgtcctgggtaagacaggcaccggggaaaggactcgagtgggtgtctactatcagctcaggaggcacttatatatattatcctgactctgtaaaaggccgatttacgatttctcgcgacaatgcaaagaactccctctacctccaaatgaacagtcttagggcagaagacactgctgtatactattgtgcacgcctcggcggcgacaactactacgagtactttgacgtgtgggggaaagggactaccgtgacagtttcaagcggaggaggtggctcaggtggaggcgggtcaggggggggaggaagtgatattgtgctcacacaatccccagcctccctggctgtgtctcccggccaacgcgctacaattacatgtcgggcctccaaaagcgtgagcaccagcggctacagctacatgcactggtatcaacagaaaccaggacaaccccccaaactgttgatttatctcgcttcaaacttggagtccggcgtgcctgcgcgcttttcagggagtgggagcggcacagattttacgctgactatcaaccccgtagaagcaaacgatacagcgaattattattgtcaacattcccgggaactcccctttacgttcggcgggggcacaaaggtcgaaattaagagaacctcgggacaggtcctgctggaatccaacatcaaggttctgcccacatggtccaccccggtgcagccaatggccctgattgtgctggggggcgtcgccggcctcctgcttttcattgggctaggcatcttcttcagaagcaagcggtctcggctcctgcattctgattacatgaacatgaccccaagaagaccaggccccaccaggaaacattaccagccctacgctccgccacgcgacttcgctgcctaccggtcccggagggaccagaggctgccccccgatgcccacaagccccctgggggaggcagtttccggacccccatccaagaggagcaggccgacgcccactccaccctggccaagatccgcgttaagttctcccgatcagccgacgcgcctgcttacaagcagggccagaaccaactgtacaacgagctgaatctcggtagacgggaagagtacgacgtgttggacaaacggagaggccgcgacccagaaatgggcggcaagcctcgcaggaaaaacccccaggagggactgtacaatgagttgcagaaagataagatggcagaagcttatagcgagatcggaatgaagggggaaaggagacgagggaaaggacacgacggcctttatcagggcctgtccacagcaacaaaagatacgtatgacgccctccatatgcaggcacttccaccacggtgataa

SEQ ID NO: 769 - protein, 504 aa, Artificial Sequence
  CAR-T C2 CD4/CD4/CD28/OX40/CD3z sequence
MALPVTALLLPLALLLHAARPEVQLVESGGGLVKPGGSLRLSCAASGFTFSGYAMSWVRQAPGKGLEWVSTISSGGTYIYYPDSVKGRFTISRDNAKNSLYLQMNSLRAEDTAVYYCARLGGDNYYEYFDVWGKGTTVTVSSGGGGSGGGGSGGGGSDIVLTQSPASLAVSPGQRATITCRASKSVSTSGYSYMHWYQQKPGQPPKLLIYLASNLESGVPARFSGSGSGTDFTLTINPVEANDTANYYCQHSRELPFTFGGGTKVEIKRTSGQVLLESNIKVLPTWSTPVQPMALIVLGGVAGLLLFIGLGIFFRSKRSRLLHSDYMNMTPRRPGPTRKHYQPYAPPRDFAAYRSRRDQRLPPDAHKPPGGGSFRTPIQEEQADAHSTLAKIRVKFSRSADAPAYKQGQNQLYNELNLGRREEYDVLDKRRGRDPEMGGKPRRKNPQEGLYNELQKDKMAEAYSEIGMKGERRRGKGHDGLYQGLSTATKDTYDALHMQALPPR

SEQ ID NO: 770 - DNA, 2202 bp, Artificial Sequence
  CAR-T E6 IgD/FC/CD8/4-1BB/CD3z CAR63
atggccctgcccgtgaccgctttgctgctccccctggcgctgctgctgcacgccgccaggccagaggtccagctggttgagagtggcggtgggctggttaagcctggcggctccctgcggctgagctgcgccgcgagtggatttactttcagccgatatgggatgagttgggtgcggcaagctcccgggaagaggctggaatgggtctcaacaatctccggggggggcacttacatctattaccccgactcagtcaaggggagatttaccatttcacgagacaacgctaagaataccctgtatttgcagatgaattctctgagagcagaggacacagctgtttactattgtacccgcgacaactatggcaggaactacgactacggtatggactattggggacaagggacattggttacagtgagcagtggcggcgggggcagcggaggaggaggcagcggtggcggaggcagcgagatagtgctcacgcagtcacccgcgactctcagtctctcacctggggaacgagctaccctgacgtgctctgctacctcctcagtgtcatatattcactggtatcagcaacggcccgggcagtcccctagattgctcatttatagtacctctaatctggcctcaggtatccctgcacgattttctggatctggttcaggttctgattacaccctcactatctctagcctggagcctgaagactttgccgtttattactgccagcagaggtctagctccccattcacctttgggagtgggaccaaggttgaaattaaagagtctccaaaggcacaggcctcctcagtgcccactgcacaaccccaagcagagggcagcctcgccaaggcaaccacagccccagccaccacccgtaacacaggaagaggcggcgaagagaagaaaaaggagaaggagaaagaggaacaagaagagagagagacaaagacaccagagcccaaatcttgtgacaaaactcacacatgcccaccgtgcccagcacctgaactcctggggggaccgtcagtcttcctcttccccccaaaacccaaggacaccctcatgatctcccggacccctgaggtcacatgcgtggtggtggacgtgagccacgaagaccctgaggtcaagttcaactggtacgtggacggcgtggaggtgcataatgccaagacaaagccgcgggaggagcagtacaacagcacgtaccgtgtggtcagcgtcctcaccgtcctgcaccaggactggctgaatggcaaggagtacaagtgcaaggtctccaacaaagccctcccagcccccatcgagaaaaccatctccaaagccaaagggcagccccgagaaccacaggtgtacaccctgcccccatcccgggaggagatgaccaagaaccaggtcagcctgacctgcctggtcaaaggcttctatcccagcgacatcgccgtggagtgggagagcaatgggcagccggagaacaactacaagaccacgcctcccgtgctggactccgacggctccttcttcctctacagcaagctcaccgtggacaagagcaggtggcagcaggggaacgtcttctcatgctccgtgatgcatgaggctctgcacaaccactacacgcagaagagcctctccctgtctccgggtaaaatctacatctgggcgcccttggccgggacttgtggggtccttctcctgtcactggttatcaccctttactgcaaacggggcagaaagaaactcctgtatatattcaaacaaccatttatgagaccagtacaaactactcaagaggaagatggctgtagctgccgatttccagaagaagaagaaggaggatgtgaactgagagtgaagttcagcaggagcgcagacgcccccgcgtacaagcagggccagaaccagctctataacgagctcaatctaggacgaagagaggagtacgatgttttggacaagagacgtggccgggaccctgagatggggggaaagccgagaaggaagaaccctcaggaaggcctgtacaatgaactgcagaaagataagatggcggaggcctacagtgagattgggatgaaaggcgagcgccggaggggcaaggggcacgatggcctttaccagggtctcagtacagccaccaaggacacctacgacgcccttcacatgcaggccctgccccctcgctgataa

SEQ ID NO: 771 - protein, 732 aa, Artificial Sequence
  CAR-T E6 IgD/FC/CD8/4-1BB/CD3z CAR63
MALPVTALLLPLALLLHAARPEVQLVESGGGLVKPGGSLRLSCAASGFTFSRYGMSWVRQAPGKRLEWVSTISGGGTYIYYPDSVKGRFTISRDNAKNTLYLQMNSLRAEDTAVYYCTRDNYGRNYDYGMDYWGQGTLVTVSSGGGGSGGGGSGGGGSEIVLTQSPATLSLSPGERATLTCSATSSVSYIHWYQQRPGQSPRLLIYSTSNLASGIPARFSGSGSGSDYTLTISSLEPEDFAVYYCQQRSSSPFTFGSGTKVEIKESPKAQASSVPTAQPQAEGSLAKATTAPATTRNTGRGGEEKKKEKEKEEQEERETKTPEPKSCDKTHTCPPCPAPELLGGPSVFLFPPKPKDTLMISRTPEVTCVVVDVSHEDPEVKFNWYVDGVEVHNAKTKPREEQYNSTYRVVSVLTVLHQDWLNGKEYKCKVSNKALPAPIEKTISKAKGQPREPQVYTLPPSREEMTKNQVSLTCLVKGFYPSDIAVEWESNGQPENNYKTTPPVLDSDGSFFLYSKLTVDKSRWQQGNVFSCSVMHEALHNHYTQKSLSLSPGKIYIWAPLAGTCGVLLLSLVITLYCKRGRKKLLYIFKQPFMRPVQTTQEEDGCSCRFPEEEEGGCELRVKFSRSADAPAYKQGQNQLYNELNLGRREEYDVLDKRRGRDPEMGGKPRRKNPQEGLYNELQKDKMAEAYSEIGMKGERRRGKGHDGLYQGLSTATKDTYDALHMQALPPR

SEQ ID NO: 772 - DNA, 2157 bp, Artificial Sequence
  CAR-T E6 IgD/FCHingeless Y407R/CD8/4-1BB/CD3z CAR64
atggccctgcccgtgaccgctttgctgctccccctggcgctgctgctgcacgccgccaggccagaggtccagctggttgagagtggcggtgggctggttaagcctggcggctccctgcggctgagctgcgccgcgagtggatttactttcagccgatatgggatgagttgggtgcggcaagctcccgggaagaggctggaatgggtctcaacaatctccggggggggcacttacatctattaccccgactcagtcaaggggagatttaccatttcacgagacaacgctaagaataccctgtatttgcagatgaattctctgagagcagaggacacagctgtttactattgtacccgcgacaactatggcaggaactacgactacggtatggactattggggacaagggacattggttacagtgagcagtggcggcgggggcagcggaggaggaggcagcggtggcggaggcagcgagatagtgctcacgcagtcacccgcgactctcagtctctcacctggggaacgagctaccctgacgtgctctgctacctcctcagtgtcatatattcactggtatcagcaacggcccgggcagtcccctagattgctcatttatagtacctctaatctggcctcaggtatccctgcacgattttctggatctggttcaggttctgattacaccctcactatctctagcctggagcctgaagactttgccgtttattactgccagcagaggtctagctccccattcacctttgggagtgggaccaaggttgaaattaaagagtctccaaaggcacaggcctcctcagtgcccactgcacaaccccaagcagagggcagcctcgccaaggcaaccacagccccagccaccacccgtaacacaggaagaggcggcgaagagaagaaaaaggagaaggagaaagaggaacaagaagagagagagacaaagacaccagcacctgaactcctggggggaccgtcagtcttcctcttccccccaaaacccaaggacaccctcatgatctcccggacccctgaggtcacatgcgtggtggtggacgtgagccacgaagaccctgaggtcaagttcaactggtacgtggacggcgtggaggtgcataatgccaagacaaagccgcgggaggagcagtacaacagcacgtaccgtgtggtcagcgtcctcaccgtcctgcaccaggactggctgaatggcaaggagtacaagtgcaaggtctccaacaaagccctcccagcccccatcgagaaaaccatctccaaagccaaagggcagccccgagaaccacaggtgtacaccctgcccccatcccgggaggagatgaccaagaaccaggtcagcctgacctgcctggtcaaaggcttctatcccagcgacatcgccgtggagtgggagagcaatgggcagccggagaacaactacaagaccacgcctcccgtgctggactccgacggctccttcttcctcaggagcaagctcaccgtggacaagagcaggtggcagcaggggaacgtcttctcatgctccgtgatgcatgaggctctgcacaaccactacacgcagaagagcctctccctgtctccgggtaaaatctacatctgggcgcccttggccgggacttgtggggtccttctcctgtcactggttatcaccctttactgcaaacggggcagaaagaaactcctgtatatattcaaacaaccatttatgagaccagtacaaactactcaagaggaagatggctgtagctgccgatttccagaagaagaagaaggaggatgtgaactgagagtgaagttcagcaggagcgcagacgcccccgcgtacaagcagggccagaaccagctctataacgagctcaatctaggacgaagagaggagtacgatgttttggacaagagacgtggccgggaccctgagatggggggaaagccgagaaggaagaaccctcaggaaggcctgtacaatgaactgcagaaagataagatggcggaggcctacagtgagattgggatgaaaggcgagcgccggaggggcaaggggcacgatggcctttaccagggtctcagtacagccaccaaggacacctacgacgcccttcacatgcaggccctgccccctcgctgataa

SEQ ID NO: 773 - protein, 717 aa, Artificial Sequence
  CAR-T E6 IgD/FCHingeless Y407R/CD8/4-1BB/CD3z CAR64
MALPVTALLLPLALLLHAARPEVQLVESGGGLVKPGGSLRLSCAASGFTFSRYGMSWVRQAPGKRLEWVSTISGGGTYIYYPDSVKGRFTISRDNAKNTLYLQMNSLRAEDTAVYYCTRDNYGRNYDYGMDYWGQGTLVTVSSGGGGSGGGGSGGGGSEIVLTQSPATLSLSPGERATLTCSATSSVSYIHWYQQRPGQSPRLLIYSTSNLASGIPARFSGSGSGSDYTLTISSLEPEDFAVYYCQQRSSSPFTFGSGTKVEIKESPKAQASSVPTAQPQAEGSLAKATTAPATTRNTGRGGEEKKKEKEKEEQEERETKTPAPELLGGPSVFLFPPKPKDTLMISRTPEVTCVVVDVSHEDPEVKFNWYVDGVEVHNAKTKPREEQYNSTYRVVSVLTVLHQDWLNGKEYKCKVSNKALPAPIEKTISKAKGQPREPQVYTLPPSREEMTKNQVSLTCLVKGFYPSDIAVEWESNGQPENNYKTTPPVLDSDGSFFLRSKLTVDKSRWQQGNVFSCSVMHEALHNHYTQKSLSLSPGKIYIWAPLAGTCGVLLLSLVITLYCKRGRKKLLYIFKQPFMRPVQTTQEEDGCSCRFPEEEEGGCELRVKFSRSADAPAYKQGQNQLYNELNLGRREEYDVLDKRRGRDPEMGGKPRRKNPQEGLYNELQKDKMAEAYSEIGMKGERRRGKGHDGLYQGLSTATKDTYDALHMQALPPR

SEQ ID NO: 774 - DNA, 3829 bp, Artificial Sequence
  NFATc1P2-MMP9
caggcctggggacactcgcggcgggaagatttggaggggaggggagggggaggggcgtgggggcgcggcctcgctggagtccccctgaccccccgacccccgcccaccggcctgggcgtcctcccgcggcccctcctcccctcccggcgcccggtgctctggggcgcgtgccacgcctggctcggcgccgtaggggcccccgcaggtagagacccctggaaatggcctcgacgccgcaggagcgaggcggccaccaccccgctaatccgggcacgtctctccaggccgaggcctgcggtggaaaagccggggttccatttgtgctgagtcggggcggccgaatggagccaggcctcgggacgcgggacggacgggctctggccgcgcaccttcgcgggctctgcagcgcccgaccgcctcccccggcagggaggaggcgcttgtggggggcacccacggggcacagtgatccctgggggtctgcggacctcctgggccccgcagcagacacgagtttagcctttgggtttagtttaaatcacataagggtgtcgtgcaatcgatttatggtttctacacaccagacactttaacctccaaccccccccatccaaagccaacaagaaaatgcggtgccgtgttggcagctgagctgcgcccgaagagacgcagggagacgtaagagaggaaagtgtgagtggccggggggcctccccccgtcagaagtcgcgcagtcgcgcccataaaacgccccctccgggcggctagggcaggtgagcgcgtccccgggcctccccacgccggcccctgccacaggccgtctaggtcgagcagatatttacagaataaaaatgacaataactcgacgtcccgggacggccacgcaatctgttagtaatttagcgggatgggaatttcctttctagggcctgccagtgaagcgcttttccaaatttccacagcgggggaagcctgcgattttacataatgacttcagcatgccgggctttctcgacacccctccccggcccccggcccccgccccccgccccttttccagcagggccgggctccctccggacacccgcgtggactcaggcgtcccgtctggcccgttcgcccccgtttcccccgccagccccagcgcccccctgcccggcccccggattccccgttcccgcccctacgcccccatcccctccccgtgcgcccctccccgtgcgcccccctccccgtgcgccccccctccccgtgcgcccccctccccgtgcgccccccctccccgggcgcccccctccccgggcgccccccctccccgtgcgcccccccctccccgtgcgccccccctccccgtgcgcgccccgcctcttgcgcccctgcccccaggcgagcggctgccgcggcgcggggaggggcgggcgctcggcgactcgtccccggggccccgcgcgggcccgggcagcaggggcgtgatgtcacggcagggagggggcgcgggagccgccgggccggcggggaggcgggggaggtgttttccagctttaaaaaggcaggaggcagagcgcggccctgcgtcagagcgagactcagaggctccgaactcgccggcggagtcgccgcgccagatcccagcagcagggcgcggaagcttctctcgacattcgtttctagagccaccatgagcctctggcagcccctggtcctggtgctcctggtgctgggctgctgctttgctgcccccagacagcgccagtccacccttgtgctcttccctggagacctgagaaccaatctcaccgacaggcagctggcagaggaatacctgtaccgctatggttacactcgggtggcagagatgcgtggagagtcgaaatctctggggcctgcgctgctgcttctccagaagcaactgtccctgcccgagaccggtgagctggatagcgccacgctgaaggccatgcgaaccccacggtgcggggtcccagacctgggcagattccaaacctttgagggcgacctcaagtggcaccaccacaacatcacctattggatccaaaactactcggaagacttgccgcgggcggtgattgacgacgcctttgcccgcgccttcgcactgtggagcgcggtgacgccgctcaccttcactcgcgtgtacagccgggacgcagacatcgtcatccagtttggtgtcgcggagcacggagacgggtatcccttcgacgggaaggacgggctcctggcacacgcctttcctcctggccccggcattcagggagacgcccatttcgacgatgacgagttgtggtccctgggcaagggcgtcgtggttccaactcggtttggaaacgcagatggcgcggcctgccacttccccttcatcttcgagggccgctcctactctgcctgcaccaccgacggtcgctccgacggcttgccctggtgcagtaccacggccaactacgacaccgacgaccggtttggcttctgccccagcgagagactctacacccaggacggcaatgctgatgggaaaccctgccagtttccattcatcttccaaggccaatcctactccgcctgcaccacggacggtcgctccgacggctaccgctggtgcgccaccaccgccaactacgaccgggacaagctcttcggcttctgcccgacccgagctgactcgacggtgatggggggcaactcggcgggggagctgtgcgtcttccccttcactttcctgggtaaggagtactcgacctgtaccagcgagggccgcggagatgggcgcctctggtgcgctaccacctcgaactttgacagcgacaagaagtggggcttctgcccggaccaaggatacagtttgttcctcgtggcggcgcatgagttcggccacgcgctgggcttagatcattcctcagtgccggaggcgctcatgtaccctatgtaccgcttcactgaggggccccccttgcataaggacgacgtgaatggcatccggcacctctatggtcctcgccctgaacctgagccacggcctccaaccaccaccacaccgcagcccacggctcccccgacggtctgccccaccggaccccccactgtccacccctcagagcgccccacagctggccccacaggtcccccctcagctggccccacaggtccccccactgctggcccttctacggccactactgtgcctttgagtccggtggacgatgcctgcaacgtgaacatcttcgacgccatcgcggagattgggaaccagctgtatttgttcaaggatgggaagtactggcgattctctgagggcagggggagccggccgcagggccccttccttatcgccgacaagtggcccgcgctgccccgcaagctggactcggtctttgaggagcggctctccaagaagcttttcttcttctctgggcgccaggtgtgggtgtacacaggcgcgtcggtgctgggcccgaggcgtctggacaagctgggcctgggagccgacgtggcccaggtgaccggggccctccggagtggcagggggaagatgctgctgttcagcgggcggcgcctctggaggttcgacgtgaaggcgcagatggtggatccccggagcgccagcgaggtggaccggatgttccccggggtgcctttggacacgcacgacgtcttccagtaccgagagaaagcctatttctgccaggaccgcttctactggcgcgtgagttcccggagtgagttgaaccaggtggaccaagtgggctacgtgacctatgacatcctgcagtgccctgaggacgattacaaggatgacgacgataagtgataa

SEQ ID NO: 775 - DNA, 2794 bp, Artificial Sequence
  NFATc1P2-MMP9cat
caggcctggggacactcgcggcgggaagatttggaggggaggggagggggaggggcgtgggggcgcggcctcgctggagtccccctgaccccccgacccccgcccaccggcctgggcgtcctcccgcggcccctcctcccctcccggcgcccggtgctctggggcgcgtgccacgcctggctcggcgccgtaggggcccccgcaggtagagacccctggaaatggcctcgacgccgcaggagcgaggcggccaccaccccgctaatccgggcacgtctctccaggccgaggcctgcggtggaaaagccggggttccatttgtgctgagtcggggcggccgaatggagccaggcctcgggacgcgggacggacgggctctggccgcgcaccttcgcgggctctgcagcgcccgaccgcctcccccggcagggaggaggcgcttgtggggggcacccacggggcacagtgatccctgggggtctgcggacctcctgggccccgcagcagacacgagtttagcctttgggtttagtttaaatcacataagggtgtcgtgcaatcgatttatggtttctacacaccagacactttaacctccaaccccccccatccaaagccaacaagaaaatgcggtgccgtgttggcagctgagctgcgcccgaagagacgcagggagacgtaagagaggaaagtgtgagtggccggggggcctccccccgtcagaagtcgcgcagtcgcgcccataaaacgccccctccgggcggctagggcaggtgagcgcgtccccgggcctccccacgccggcccctgccacaggccgtctaggtcgagcagatatttacagaataaaaatgacaataactcgacgtcccgggacggccacgcaatctgttagtaatttagcgggatgggaatttcctttctagggcctgccagtgaagcgcttttccaaatttccacagcgggggaagcctgcgattttacataatgacttcagcatgccgggctttctcgacacccctccccggcccccggcccccgccccccgccccttttccagcagggccgggctccctccggacacccgcgtggactcaggcgtcccgtctggcccgttcgcccccgtttcccccgccagccccagcgcccccctgcccggcccccggattccccgttcccgcccctacgcccccatcccctccccgtgcgcccctccccgtgcgcccccctccccgtgcgccccccctccccgtgcgcccccctccccgtgcgccccccctccccgggcgcccccctccccgggcgccccccctccccgtgcgcccccccctccccgtgcgccccccctccccgtgcgcgccccgcctcttgcgcccctgcccccaggcgagcggctgccgcggcgcggggaggggcgggcgctcggcgactcgtccccggggccccgcgcgggcccgggcagcaggggcgtgatgtcacggcagggagggggcgcgggagccgccgggccggcggggaggcgggggaggtgttttccagctttaaaaaggcaggaggcagagcgcggccctgcgtcagagcgagactcagaggctccgaactcgccggcggagtcgccgcgccagatcccagcagcagggcgcggaagcttctctcgacattcgtttctagagccaccatgagcctctggcagcccctggtcctggtgctcctggtgctgggctgctgctttgctttccaaacctttgagggcgacctcaagtggcaccaccacaacatcacctattggatccaaaactactcggaagacttgccgcgggcggtgattgacgacgcctttgcccgcgccttcgcactgtggagcgcggtgacgccgctcaccttcactcgcgtgtacagccgggacgcagacatcgtcatccagtttggtgtcgcggagcacggagacgggtatcccttcgacgggaaggacgggctcctggcacacgcctttcctcctggccccggcattcagggagacgcccatttcgacgatgacgagttgtggtccctgggcaagggcgtcgtggttccaactcggtttggaaacgcagatggcgcggcctgccacttccccttcatcttcgagggccgctcctactctgcctgcaccaccgacggtcgctccgacggcttgccctggtgcagtaccacggccaactacgacaccgacgaccggtttggcttctgccccagcgagagactctacacccaggacggcaatgctgatgggaaaccctgccagtttccattcatcttccaaggccaatcctactccgcctgcaccacggacggtcgctccgacggctaccgctggtgcgccaccaccgccaactacgaccgggacaagctcttcggcttctgcccgacccgagctgactcgacggtgatggggggcaactcggcgggggagctgtgcgtcttccccttcactttcctgggtaaggagtactcgacctgtaccagcgagggccgcggagatgggcgcctctggtgcgctaccacctcgaactttgacagcgacaagaagtggggcttctgcccggaccaaggatacagtttgttcctcgtggcggcgcatgagttcggccacgcgctgggcttagatcattcctcagtgccggaggcgctcatgtaccctatgtaccgcttcactgaggggccccccttgcataaggacgacgtgaatggcatccggcacctctatggtcctcgccctgaacctgattacaaggatgacgacgataagtgataa

SEQ ID NO: 776 - DNA, 32 bp, Artificial Sequence
  NFAT response element 2
aagaggaaaatttgtttcatacagaaggcgtt

SEQ ID NO: 777 - DNA, 128 bp, Artificial Sequence
  NFAT response element 2 repeats
aagaggaaaatttgtttcatacagaaggcgttaagaggaaaatttgtttcatacagaaggcgttaagaggaaaatttgtttcatacagaaggcgttaagaggaaaatttgtttcatacagaaggcgtt

SEQ ID NO: 778 - DNA, 118 bp, Artificial Sequence
  CMV minimal promoter 2
taggcgtgtacggtgggaggcctatataagcagagctcgtttagtgaaccgtcagatcgcctggagacgccatccacgctgttttgacctccatagaagacaccgggaccgatccagc

SEQ ID NO: 779 - DNA, 2430 bp, Artificial Sequence
  NFATRE2mCMV2-MMP9
aagaggaaaatttgtttcatacagaaggcgttaagaggaaaatttgtttcatacagaaggcgttaagaggaaaatttgtttcatacagaaggcgttaagaggaaaatttgtttcatacagaaggcgttactagttaggcgtgtacggtgggaggcctatataagcagagctcgtttagtgaaccgtcagatcgcctggagacgccatccacgctgttttgacctccatagaagacaccgggaccgatccagcctctcgacattcgtttctagagccaccatgagcctctggcagcccctggtcctggtgctcctggtgctgggctgctgctttgctgcccccagacagcgccagtccacccttgtgctcttccctggagacctgagaaccaatctcaccgacaggcagctggcagaggaatacctgtaccgctatggttacactcgggtggcagagatgcgtggagagtcgaaatctctggggcctgcgctgctgcttctccagaagcaactgtccctgcccgagaccggtgagctggatagcgccacgctgaaggccatgcgaaccccacggtgcggggtcccagacctgggcagattccaaacctttgagggcgacctcaagtggcaccaccacaacatcacctattggatccaaaactactcggaagacttgccgcgggcggtgattgacgacgcctttgcccgcgccttcgcactgtggagcgcggtgacgccgctcaccttcactcgcgtgtacagccgggacgcagacatcgtcatccagtttggtgtcgcggagcacggagacgggtatcccttcgacgggaaggacgggctcctggcacacgcctttcctcctggccccggcattcagggagacgcccatttcgacgatgacgagttgtggtccctgggcaagggcgtcgtggttccaactcggtttggaaacgcagatggcgcggcctgccacttccccttcatcttcgagggccgctcctactctgcctgcaccaccgacggtcgctccgacggcttgccctggtgcagtaccacggccaactacgacaccgacgaccggtttggcttctgccccagcgagagactctacacccaggacggcaatgctgatgggaaaccctgccagtttccattcatcttccaaggccaatcctactccgcctgcaccacggacggtcgctccgacggctaccgctggtgcgccaccaccgccaactacgaccgggacaagctcttcggcttctgcccgacccgagctgactcgacggtgatggggggcaactcggcgggggagctgtgcgtcttccccttcactttcctgggtaaggagtactcgacctgtaccagcgagggccgcggagatgggcgcctctggtgcgctaccacctcgaactttgacagcgacaagaagtggggcttctgcccggaccaaggatacagtttgttcctcgtggcggcgcatgagttcggccacgcgctgggcttagatcattcctcagtgccggaggcgctcatgtaccctatgtaccgcttcactgaggggccccccttgcataaggacgacgtgaatggcatccggcacctctatggtcctcgccctgaacctgagccacggcctccaaccaccaccacaccgcagcccacggctcccccgacggtctgccccaccggaccccccactgtccacccctcagagcgccccacagctggccccacaggtcccccctcagctggccccacaggtccccccactgctggcccttctacggccactactgtgcctttgagtccggtggacgatgcctgcaacgtgaacatcttcgacgccatcgcggagattgggaaccagctgtatttgttcaaggatgggaagtactggcgattctctgagggcagggggagccggccgcagggccccttccttatcgccgacaagtggcccgcgctgccccgcaagctggactcggtctttgaggagcggctctccaagaagcttttcttcttctctgggcgccaggtgtgggtgtacacaggcgcgtcggtgctgggcccgaggcgtctggacaagctgggcctgggagccgacgtggcccaggtgaccggggccctccggagtggcagggggaagatgctgctgttcagcgggcggcgcctctggaggttcgacgtgaaggcgcagatggtggatccccggagcgccagcgaggtggaccggatgttccccggggtgcctttggacacgcacgacgtcttccagtaccgagagaaagcctatttctgccaggaccgcttctactggcgcgtgagttcccggagtgagttgaaccaggtggaccaagtgggctacgtgacctatgacatcctgcagtgccctgaggacgattacaaggatgacgacgataagtgataa

SEQ ID NO: 780 - DNA, 1401 bp, Artificial Sequence
  NFATRE2mCMV2-MMP9cat
aagaggaaaatttgtttcatacagaaggcgttaagaggaaaatttgtttcatacagaaggcgttaagaggaaaatttgtttcatacagaaggcgttaagaggaaaatttgtttcatacagaaggcgttactagttaggcgtgtacggtgggaggcctatataagcagagctcgtttagtgaaccgtcagatcgcctggagacgccatccacgctgttttgacctccatagaagacaccgggaccgatccagcctcgagctctcgacattcgtttctagagccaccatgagcctctggcagcccctggtcctggtgctcctggtgctgggctgctgctttgctttccaaacctttgagggcgacctcaagtggcaccaccacaacatcacctattggatccaaaactactcggaagacttgccgcgggcggtgattgacgacgcctttgcccgcgccttcgcactgtggagcgcggtgacgccgctcaccttcactcgcgtgtacagccgggacgcagacatcgtcatccagtttggtgtcgcggagcacggagacgggtatcccttcgacgggaaggacgggctcctggcacacgcctttcctcctggccccggcattcagggagacgcccatttcgacgatgacgagttgtggtccctgggcaagggcgtcgtggttccaactcggtttggaaacgcagatggcgcggcctgccacttccccttcatcttcgagggccgctcctactctgcctgcaccaccgacggtcgctccgacggcttgccctggtgcagtaccacggccaactacgacaccgacgaccggtttggcttctgccccagcgagagactctacacccaggacggcaatgctgatgggaaaccctgccagtttccattcatcttccaaggccaatcctactccgcctgcaccacggacggtcgctccgacggctaccgctggtgcgccaccaccgccaactacgaccgggacaagctcttcggcttctgcccgacccgagctgactcgacggtgatggggggcaactcggcgggggagctgtgcgtcttccccttcactttcctgggtaaggagtactcgacctgtaccagcgagggccgcggagatgggcgcctctggtgcgctaccacctcgaactttgacagcgacaagaagtggggcttctgcccggaccaaggatacagtttgttcctcgtggcggcgcatgagttcggccacgcgctgggcttagatcattcctcagtgccggaggcgctcatgtaccctatgtaccgcttcactgaggggccccccttgcataaggacgacgtgaatggcatccggcacctctatggtcctcgccctgaacctgattacaaggatgacgacgataagtgataa

SEQ ID NO: 781 - DNA, 2238 bp, Artificial Sequence
  NFATc1 Promoter fragment (P1)
aggcaggaggaagaggaaaggggcgcagggcgctcggggagcagagccgggggcccgcggtggccgcagaggccgggccggggcgcagaggccgggcgagctggccgcgctctgggccgccgcctccggaactccctgcgcctggcgcgcggccaccgtggtcccggcaacggcattaaacagagggaaacagacccgggattccgtcacccgggcggggggataaggacggctttgagagcagacaggaaaagggagcttttctgcatggggtgaaaaaattatttattgaaggaggaggaggcggcagcggaggaaggggaggggcgggaggaggaggaagagccggccgcccccgccccggccccggctcctcaggagccaagggcagcctcgccaggtcggtcccgggctcgaggaccgcggctggggtcgaggggctcagtctcccacgtgaccggctgggcgcgccccgccagacccggcctcgggattccctcctcccggcgagtctccgcccgccccgtcctggaggtggggagaaggagggcggggcgggggggacggaaactctccccgccaaatcctggccccaggcctggggacactcgcggcgggaagatttggaggggaggggagggggaggggcgtgggggcgcggcctcgctggagtccccctgaccccccgacccccgcccaccggcctgggcgtcctcccgcggcccctcctcccctcccggcgcccggtgctctggggcgcgtgccacgcctggctcggcgccgtaggggcccccgcaggtagagacccctggaaatggcctcgacgccgcaggagcgaggcggccaccaccccgctaatccgggcacgtctctccaggccgaggcctgcggtggaaaagccggggttccatttgtgctgagtcggggcggccgaatggagccaggcctcgggacgcgggacggacgggctctggccgcgcaccttcgcgggctctgcagcgcccgaccgcctcccccggcagggaggaggcgcttgtggggggcacccacggggcacagtgatccctgggggtctgcggacctcctgggccccgcagcagacacgagtttagcctttgggtttagtttaaatcacataagggtgtcgtgcaatcgatttatggtttctacacaccagacactttaacctccaaccccccccatccaagccaacaagaaaatgcggtgccgtgttggcagctgagctgcgcccgaagagacgcagggagacgtaagagaggaaagtgtgagtggccggggggcctccccccgtcagaagtcgcgcagtcgcgcccataaaacgccccctccgggcggctagggcaggtgagcgcgtccccgggcctccccacgccggcccctgccacagagccgtctaggtcgagcagatatttacagaataaaaatgacaataactcgacgtcccgggacggccacgcaatctgttagtaatttagcgggatgggaatttcctttctagggcctgccagtgaagcgcttttccaaatttccacagcgggggaagcctgcgattttacataatgacttcagcatgccgggctttctcgacacccctccccggcccccggcccccgccccccgccccttttccagcagggccgggctccctccggacacccgcgtggactcaggcgtcccgtctggcccgttcgcccccgtttcccccgccagccccagcgcccccctgcccggcccccggattccccgttcccgcccctacgcccccatcccctccccgtgcgcccctccccgtgcgcccccctccccgtgcgccccccctccccgtgcgcccccctccccgtgcgccccccctccccgggcgcccccctccccgggcgccccccctccccgtgcgcccccccctccccgtgcgccccccctccccgtgcgcgccccgcctcttgcgcccctgcccccaggcgagcggctgccgcggcgcggggaggggcgggcgctcggcgactcgtccccggggccccgcgcgggcccgggcagcaggggcgtgatgtcacggcagggagggggcgcgggagccgccgggccggcggggaggcgggggaggtgttttccagctttaaaaaggcaggaggcagagcgcggccctgcgtcagagcgagactcagaggctccgaactcgccggcggagtcgccgcgccagatcccagcagcagggcgcgg

SEQ ID NO: 782 - DNA, 2186 bp, Artificial Sequence; identical to SEQ ID NO: 646
  NFATc1 Promoter fragment (P2)

SEQ ID NO: 783 - DNA, 1645 bp, Artificial Sequence
  NFATc1 Promoter fragment (P3)
caggcctggggacactcgcggcgggaagatttggaggggaggggagggggaggggcgtgggggcgcggcctcgctggagtccccctgaccccccgacccccgcccaccggcctgggcgtcctcccgcggcccctcctcccctcccggcgcccggtgctctggggcgcgtgccacgcctggctcggcgccgtaggggcccccgcaggtagagacccctggaaatggcctcgacgccgcaggagcgaggcggccaccaccccgctaatccgggcacgtctctccaggccgaggcctgcggtggaaaagccggggttccatttgtgctgagtcggggcggccgaatggagccaggcctcgggacgcgggacggacgggctctggccgcgcaccttcgcgggctctgcagcgcccgaccgcctcccccggcagggaggaggcgcttgtggggggcacccacggggcacagtgatccctgggggtctgcggacctcctgggccccgcagcagacacgagtttagcctttgggtttagtttaaatcacataagggtgtcgtgcaatcgatttatggtttctacacaccagacactttaacctccaaccccccccatccaaagccaacaagaaaatgcggtgccgtgttggcagctgagctgcgcccgaagagacgcagggagacgtaagagaggaaagtgtgagtggccggggggcctccccccgtcagaagtcgcgcagtcgcgcccataaaacgccccctccgggcggctagggcaggtgagcgcgtccccgggcctccccacgccggcccctgccacaggccgtctaggtcgagcagatatttacagaataaaaatgacaataactcgacgtcccgggacggccacgcaatctgttagtaatttagcgggatgggaatttcctttctagggcctgccagtgaagcgcttttccaaatttccacagcgggggaagcctgcgattttacataatgacttcagcatgccgggctttctcgacacccctccccggcccccggcccccgccccccgccccttttccagcagggccgggctccctccggacacccgcgtggactcaggcgtcccgtctggcccgttcgcccccgtttcccccgccagccccagcgcccccctgcccggcccccggattccccgttcccgcccctacgcccccatcccctccccgtgcgcccctccccgtgcgcccccctccccgtgcgccccccctccccgtgcgcccccctccccgtgcgccccccctccccgggcgcccccctccccgggcgccccccctccccgtgcgcccccccctccccgtgcgccccccctccccgtgcgcgccccgcctcttgcgcccctgcccccaggcgagcggctgccgcggcgcggggaggggcgggcgctcggcgactcgtccccggggccccgcgcgggcccgggcagcaggggcgtgatgtcacggcagggagggggcgcgggagccgccgggccggcggggaggcgggggaggtgttttccagctttaaaaaggcaggaggcagagcgcggccctgcgtcagagcgagactcagaggctccgaactcgccggcggagtcgccgcgccagatcccagcagcagggcgcgg

SEQ ID NO: 784 - DNA, 927 bp, Artificial Sequence
  pNFAT-MMP9cat-1 gBLOCK sequence
aagaggaaaatttgtttcatacagaaggcgttactagttaggcgtgtacggtgggaggcctatataagcagagctcgtttagtgaaccgtcagatcgcctggagacgccatccacgctgttttgacctccatagaagacaccgggaccgatccagcctctcgacattcgtttctagagccaccatgagcctctggcagcccctggtcctggtgctcctggtgctgggctgctgctttgctttccaaacctttgagggcgacctcaagtggcaccaccacaacatcacctattggatccaaaactactcggaagacttgccgcgggcggtgattgacgacgcctttgcccgcgccttcgcactgtggagcgcggtgacgccgctcaccttcactcgcgtgtacagccgggacgcagacatcgtcatccagtttggtgtcgcggagcacggagacgggtatcccttcgacgggaaggacgggctcctggcacacgcctttcctcctggccccggcattcagggagacgcccatttcgacgatgacgagttgtggtccctgggcaagggcgtcgtggttccaactcggtttggaaacgcagatggcgcggcctgccacttccccttcatcttcgagggccgctcctactctgcctgcaccaccgacggtcgctccgacggcttgccctggtgcagtaccacggccaactacgacaccgacgaccggtttggcttctgccccagcgagagactctacacccaggacggcaatgctgatgggaaaccctgccagtttccattcatcttccaaggccaatcctactccgcctgcaccacggacggtcgctccgacggctaccgctggtgcgccaccaccgccaactacgaccgggacaagctcttcggcttctgcccgacccgagctgactcg

SEQ ID NO: 785 - DNA, 1064 bp, Artificial Sequence
  pNFAT-MMP9cat-2 gBLOCK sequence
ttcggcttctgcccgacccgagctgactcgacggtgatggggggcaactcggcgggggagctgtgcgtcttccccttcactttcctgggtaaggagtactcgacctgtaccagcgagggccgcggagatgggcgcctctggtgcgctaccacctcgaactttgacagcgacaagaagtggggcttctgcccggaccaaggatacagtttgttcctcgtggcggcgcatgagttcggccacgcgctgggcttagatcattcctcagtgccggaggcgctcatgtaccctatgtaccgcttcactgaggggccccccttgcataaggacgacgtgaatggcatccggcacctctatggtcctcgccctgaacctgattacaaggatgacgacgataagtgataagctagctcgactcgacaatcaacctctggattacaaaatttgtgaaagattgactggtattcttaactatgttgctccttttacgctatgtggatacgctgctttaatgcctttgtatcatgctattgcttcccgtatggctttcattttctcctccttgtataaatcctggttgctgtctctttatgaggagttgtggcccgttgtcaggcaacgtggcgtggtgtgcactgtgtttgctgacgcaacccccactggttggggcattgccaccacctgtcagctcctttccgggactttcgctttccccctccctattgccacggcggaactcatcgccgcctgccttgcccgctgctggacaggggctcggctgttgggcactgacaattccgtggtgttgtcggggaaatcatcgtcctttccttggctgctcgcctgtgttgccacctggattctgcgcgggacgtccttctgctacgtcccttcggccctcaatccagcggaccttccttcccgcggcctgctgccggctctgcggcctcttccgcatcttcgccttcgccctcagacgagtcggatctccctttgggccgcctccccgcctggaattaattcgagctcggtacctttaagaccaatgacttacaaggcagctgtag

SEQ ID NO: 786 - DNA, 35 bp, Artificial Sequence
  Primer
tagatggtaccaagaggaaaatttgtttcatacag

SEQ ID NO: 787 - DNA, 31 bp, Artificial Sequence
  Primer
tagataagcttgctggatcggtcccggtgtc

SEQ ID NO: 788 - DNA, 38 bp, Artificial Sequence
  Primer
tcatacagaaggcgttactagttaggcgtgtacggtgg

SEQ ID NO: 789 - DNA, 47 bp, Artificial Sequence
  Primer
acagtaccggattgccaagcttttatcacttatcgtcgtcatccttg

SEQ ID NO: 790 - DNA, 34 bp, Artificial Sequence
  Primer
aagttggtaccgttccaaacctttgagggcgacc

SEQ ID NO: 791 - DNA, 34 bp, Artificial Sequence
  Primer
aagttctcgagcaggttcagggcgaggaccatag

SEQ ID NO: 792 - DNA, 34 bp, Artificial Sequence
  Primer
attgactcgagctctcgacattcgtttctagagc

SEQ ID NO: 793 - DNA, 36 bp, Artificial Sequence
  Primer
attgaaagcttttatcacttatcgtcgtcatccttg

SEQ ID NO: 794 - DNA, 19 bp, Artificial Sequence
  Primer
tagcaaaataggctgtccc

SEQ ID NO: 795 - DNA, 31 bp, Artificial Sequence
  Primer
attgactcgaggctggatcggtcccggtgtc

SEQ ID NO: 796 - DNA, 50 bp, Artificial Sequence
  Primer
aagacaccgggaccgatccagcctcgagagacccaagctggctagccacc

SEQ ID NO: 797 - DNA, 50 bp, Artificial Sequence
  Primer
ttaccaacagtaccggattgccaagcttttatcacttatcgtcgtcatcc

SEQ ID NO: 798 - DNA, 34 bp, Artificial Sequence
  Primer
attgaaagcttctctcgacattcgtttctagagc

SEQ ID NO: 799 - DNA, 32 bp, Artificial Sequence
  Primer
attgagagctcttatcacttatcgtcgtcatc

SEQ ID NO: 800 - DNA, 736 bp, Artificial Sequence
  NFAT modif 1 gBLOCK sequence
attctgtggataaccgtattaccgctagcatggatctcggggacgtctaactactaagcgagagtagggaactgccaggcatcaaataaaacgaaaggctcagtcggaagactgggcctttcgttttatctgttgtttgtcggtgaacgctctcctgagtaggacaaatccgccgggagcggatttgaacgttgtgaagcaacggcccggagggtggcgggcaggacgcccgccataaactgccaggcatcaaactaagcagaaggccatcctgacggatggcctttttgcgtttctacaaactcttcctgttagttagttacttaagctcgggccccaaattatgattttgttctgactgatagtgacctgttcgttgcaacaaattgataagcaatgcttttttataatgccaactttgtacaaaaaagcaggcttcgctgtgccttctagttgccagccatctgttgtttgcccctcccccgtgccttccttgaccctggaaggtgccactcccactgtcctttcctaataaaatgaggaaattgcatcgcattgtctgagtaggtgtcattctattctggggggtggggtggggcaggacagcaagggggaggattgggaagacaatagcaggcatgctggggatgcggtgggctctatggttcgaaggagatagaaccagatcttgactagtggtaccgaattccaggcctggggacactcgcggcgggaa

SEQ ID NO: 801 - DNA, 802 bp, Artificial Sequence
  NFAT modif 2 gBLOCK sequences
acaaggatgacgacgataagtgataagagctcgctagcgatatcgccaccatgggggtaaaagttcttttcgcgcttatctgtatcgcggttgcagaagctaaaccaacagaaaataatgaagactttaacattgttgccgtggcatcgaacttcgccacaaccgatttggacgctgatcgcgggaaactgcccggcagccaccacggctcgcaaagctcggtttgcccggacttgcaccgttgtgggcgcgggcaagcgcatcgtgagcagcgtcgcttgcagcaccgtgggcgcggccagcaattacgcgaccacggaagccgttgttaaccacgcgaagtagcacgtcaagaagctgccgctggaggtgctcaaagagctggaagccaatgcccggaaagctggctgcaccaggggctgtctgatctgcctgtcccacatcaagtgcacgcccaagatgaagaagttcatcccaggacgctgccacacctacgaaggcgacaaagagtccgcacagggcggcataggcgaggcgatcgtcgacattcctgagattcctgggttcaaggacttggagcccctggagcagttcatcgcacaggtcgatctgtgtgtggactgcacaactggctgcctcaaagggcttgccaacgtgcagtgttctgacctgctcaagaagtggctgccgcaacgctgtgcgacctttgccagcaagatccagggccaggtggacaagatcaagggggccggtggtgactaagcggccgctcgagcatgcatctagaaataattcttactgt

SEQ ID NO: 802 - DNA, 52 bp, Artificial Sequence
  Primer
acaaaattcaaaattttatcgatactagttggcctaactggccggtaccaag

SEQ ID NO: 803 - DNA, 49 bp, Artificial Sequence
  Primer
atccgatttaaattcgaattcgctagcttatcacttatcgtcgtcatcc

SEQ ID NO: 804 - DNA, 13 bp, Artificial Sequence
  NFAT consensus sequence
  misc_feature (9)..(9): n is a, c, g, or t
  misc_feature (13)..(13): n is a, c, g, or t
atggaaaanatcn

SEQ ID NO: 805 - DNA, 32 bp, Artificial Sequence; identical to SEQ ID NO: 776
  Current NFAT RE (Form System Biosciences. The sequence is from the mouse IL2 promoter

SEQ ID NO: 806 - DNA, 812 bp, Artificial Sequence
  Mouse IL2 Promoter (highlighted in green the NFAT RE used, highlighted in yellow is the start codon)
aactagagacatataaaataacaccaacatccttagatacaacccttcctgagaatttattggacatcatactctttttaaaaagcataataaacatcaagacacttacacaaaatatgttaaattaaatttaaaacaacaacgacaaaatagtacctcaagctcaacaagcattttaggtgtccttagcttactatttctctggctaactgtatgaagccatctatcaccctgtgtgcaattagctcattgtgtagataagaaggtaaaaccatcttgaaacaggaaaccaatatccttcctgtctaatcaacaaatctaaaagatttattcttttcatctatctcctcttgcgtttgtccaccacaacaggctgcttacaggttcaggatggttttgacaaagagaacattttcatgagttacttttgtgtctccaccccaaagaggaaaatttgtttcatacagaaggcgttcattgtatgaattaaaactgccacctaagtgtgggctaacccgaccaagagggatttcacctaaatccattcagtcagtgtatgggggtttaaagaaattccagagagtcatcagaagaggaaaaacaaaaggtaatgctttctgccacacaggtagactctttgaaaatatgtgtaatatgtaaaacatcgtgacacccccatattatttttccagcattaacagtataaattgcctcccatgctgaagagctgcctatcacccttgctaatcactcctcacagtgacctcaagtcctgcaggcatgtacagcatgcagctcgcatcctgtgtcac

SEQ ID NO: 807 - DNA, 30 bp, Artificial Sequence; identical to SEQ ID NO: 649
  NFAT RE (Form PRomega. The sequence is from the humane IL2 promoter

SEQ ID NO: 808 - DNA, 33 bp, Artificial Sequence
  Possible NFAT RE from ET-1 promoter
tccagggaaaatcggagtagaacaagagggatg

SEQ ID NO: 809 - DNA, 34 bp, Artificial Sequence
  Possible NFAT RE from ET-1 promoter
actgttggaaaacgtaaacacgttattaaacggt

SEQ ID NO: 810 - DNA, 20 bp, Artificial Sequence
  Possible NFAT RE from human CD3?
tccttaacggaaaaacaaaa

SEQ ID NO: 811 - DNA, 20 bp, Artificial Sequence
  Possible NFAT RE from human CD3?
aaaggaaaaagtatatgttc

SEQ ID NO: 812 - DNA, 17 bp, Artificial Sequence
  Possible NFAT RE from human IL3 promoter
atgccatggaaagggtg

SEQ ID NO: 813 - DNA, 22 bp, Artificial Sequence
  Possible NFAT RE from human GPC6
aaggggaaatgttgagtctaga

SEQ ID NO: 814 - DNA, 17 bp, Artificial Sequence
  Possible NFAT RE from human growth hormone-releasing hormone
aacttggaaaagcatag

SEQ ID NO: 815 - DNA, 5320 bp, Artificial Sequence
  NFATc1 promoter large
ttatgccgtctagaggagacatactttctactcaaagctacacacatagactacaacgatgggaaaagacgacacaccaacagcgacttcaggaaagctggagtggctgctaatgttagacaaaataggctttttaaaaaaggttttattaaagaggaatgtttcgtaatgataaaagcactaatctgtgagaaagatacaacaatgataaacatacgtgcagctaataagagagctccaaaatctatgaagcaaaaactcacagaatgaggggagaagcagttctacaacagagaatggggacttcgatactccactttcaataatggatacaacaaccaggcagataacaaggcaacagaaggcctgaacaacagtataaaccaattagacctaccagatatctatagctagcacactccacccaacgacagcagaatacacattcttctcaagcgcacaagtaacatcctccaggatgggccatgttctaggccatcaaacaaactcaggtggtttgaggccagaggcctctcttttaaccaccacactagggccttcggaggaggcaagcagagagttgtcaaagaggccctcaggactgggtgcagtggctcatgactgtaatcccagcactttagaaggctgaggcacaaggatcttttgagctcaggagttcaagaaatgagcacttatccactgggcgcggtggctcacgccagtaatccagcactttgggaggcttaggcgggcggatcaagaggtcagaagctcaagaccagcctgaccaacatggtgaaaccccgtctctactaaaagtacaaaaattagccgggcgtggtggcgcacacctgtaatcccagctacttgggaggctgaggcaggagaatcacttgaacccgggaggtggaggttgcagtgagtggagatcacaccattgcaccccagcctgggcaacagagcgagactccgtctcaaaaaaaaaaaaaaaaaaaaagaaagaaagaaaaagaaaaaaaaagtgagcatgtattttgccagagtctggagattagaattaaattagcaaaccagaattatagaaaaagctatttacttttaagtaaacagctgagatttttttttttaagtcagtgtgaatgaagctcacagccatggttggagctgagaaagaaggatttccctttagttatgcacctgtgtcagcaccttctgactttccttctaaagtctggggtgttcctgaggatccgtaagtttggggttcagggtttctacagcatgctgttacttgtgaaacatctctttaaccatgtcccagagttgcccaggagtttaagaccagcctgagcaacatagcaagacctcatctcaacaacaacaaaaattagaaataaattagccaggtgtggtgacatgtgcctgtagtcccagctactcagaaggctgaggcatgaggatcacttgggcccaggaagttggggctgcagggagccctgttcatgccgctgcactccagcctgcaagacagagcagaaaaaaagaatcaggatcctgggcagagggaggagaggggaccggggtccagcaagcacttggggattgactgaatggcgttggggagagatgactccaaagtcctggagtgggtgagaatgactgcgagtggcttttaggtggggaggttcctgcctggccactccgggaggggacgtggggctgaagggtatcaggtgccgtgctgagcagtttggccttgatcctaatgccctggacacacgtctagggtaggaaagttgactgatccattggtgatctgagtttttagacatggtggtagtccatgaggtgggtgttcatgctaagagtttagacagggaaacctatgaagcccttagcaaccctccagggaaggggcgtggttaaagagatgtttcataagtaacagcatggtatagaaactctgaaccccaaatgtatgggtcctcaggaacaccccagactttagaaggaaagtcagaaggtgctgacacgggtgtataactaaagggaaatccttctttctcagctccaaccatggctgtgaggttcattcacactgacttaaaaaaaaaaatctcagtttacttaaaagtaaatagctttttctataattctggtttgctaatttaatcctagtctccagaccctggctaaataaatgcccatttctccagatggtctcaagagtctctggacatcgtgggggcccttccctgttggttggaaggtgcctcaggaagaagggggtggattctgagttgagtcaaaacctcaaagacccctgatgggaaaagctctcaagtgaccaccgctgtgggccagaatgcaaaactgcaggaacagaacattcgcaggaacagaacacagtcgtattaagtgattttcccgagcaggaagtggcatctggcctgcggttcagtagggggaggaaagggtgggcgcacctgcccctggctggcgcacctgccaggtagccccacgcggcaccgcgtgtgccgagcgcccctgaggatggaaagccccacgcggggcaggtggcacccaccctccgaagacgggacgggatggagcgttgagcttcggggcagctccggcccggcccgcgctggagacgcccgcatctgccaggatggcgtctcatagccctggtgctcacacatgacgccaggaagccccagcaacagtgaccgcccaggctctagaaaatattggacggggtggatgaacacccaagtgcgctccaggagaagggatttggcaccccaaggggcttttaaaacggtaagcttctaggggtgtctttgcccccaataatccatagaaacaacagtcatctaaaaatagtcttgttttctgtcctaagctccttttaactttgttagtcatcaccaatcctaaaataaaacccgtgtaacgtctcccctagtagcggctataaacaaacctacgaggaggcaggaggaagaggaaaggggcgcagggcgctcggggagcagagccgggggcccgcggtggccgcagaggccgggccggggcgcagaggccgggcgagctggccgcgctctgggccgccgcctccggaactccctgcgcctggcgcgcggccaccgtggtcccggcaacggcattaaacagagggaaacagacccgggattccgtcacccgggcggggggataaggacggctttgagagcagacaggaaaagggagcttttctgcatggggtgaaaaaattatttattgaaggaggaggaggcggcagcggaggaaggggaggggcgggaggaggaggaagagccggccgcccccgccccggccccggctcctcaggagccaagggcagcctcgccaggtcggtcccgggctcgaggaccgcggctggggtcgaggggctcagtctcccacgtgaccggctgggcgcgccccgccagacccggcctcgggattccctcctcccggcgagtctccgcccgccccgtcctggaggtggggagaaggagggcggggcgggggggacggaaactctccccgccaaatcctggccccaggcctggggacactcgcggcgggaagatttggaggggaggggagggggaggggcgtgggggcgcggcctcgctggagtccccctgaccccccgacccccgcccaccggcctgggcgtcctcccgcggcccctcctcccctcccggcgcccggtgctctggggcgcgtgccacgcctggctcggcgccgtaggggcccccgcaggtagagacccctggaaatggcctcgacgccgcaggagcgaggcggccaccaccccgctaatccgggcacgtctctccaggccgaggcctgcggtggaaaagccggggttccatttgtgctgagtcggggcggccgaatggagccaggcctcgggacgcgggacggacgggctctggccgcgcaccttcgcgggctctgcagcgcccgaccgcctcccccggcagggaggaggcgcttgtggggggcacccacggggcacagtgatccctgggggtctgcggacctcctgggccccgcagcagacacgagtttagcctttgggtttagtttaaatcacataagggtgtcgtgcaatcgatttatggtttctacacaccagacactttaacctccaaccccccccatccaaagccaacaagaaaatgcggtgccgtgttggcagctgagctgcgcccgaagagacgcagggagacgtaagagaggaaagtgtgagtggccggggggcctccccccgtcagaagtcgcgcagtcgcgcccataaaacgccccctccgggcggctagggcaggtgagcgcgtccccgggcctccccacgccggcccctgccacaggccgtctaggtcgagcagatatttacagaataaaaatgacaataactcgacgtcccgggacggccacgcaatctgttagtaatttagcgggatgggaatttcctttctagggcctgccagtgaagcgcttttccaaatttccacagcgggggaagcctgcgattttacataatgacttcagcatgccgggctttctcgacacccctccccggcccccggcccccgccccccgccccttttccagcagggccgggctccctccggacacccgcgtggactcaggcgtcccgtctggcccgttcgcccccgtttcccccgccagccccagcgcccccctgcccggcccccggattccccgttcccgcccctacgcccccatcccctccccgtgcgcccctccccgtgcgcccccctccccgtgcgccccccctccccgtgcgcccccctccccgtgcgccccccctccccgggcgcccccctccccgggcgccccccctccccgtgcgcccccccctccccgtgcgccccccctccccgtgcgcgccccgcctcttgcgcccctgcccccaggcgagcggctgccgcggcgcggggaggggcgggcgctcggcgactcgtccccggggccccgcgcgggcccgggcagcaggggcgtgatgtcacggcagggagggggcgcgggagccgccgggccggcggggaggcgggggaggtgttttccagctttaaaaaggcaggaggcagagcgcggccctgcgtcagagcgagactcagaggctccgaactcgccggcggagtcgccgcgccagatcccagcagcagggcgcgggcaccggggcgcgggcagggctcggagccaccgcgcaggtcctagggccgcggccgggccccgccacgcgcgcacacgcccctcgatg

SEQ ID NO: 816 - DNA, 361 bp, Artificial Sequence
  NFATc3 promoter sequence
gcagccaggcagggtgggcgcgcgtagggggcggggccgggcgcgcggcagggcgcgagagcgcacccgcggcggcggtggcggcgactgtgggggggcggcggggaacattggctaagccgacagtggaggcttaggcaccggtggcgggcggctgcggttcctggtgctgctcggcgcgcggccagctttcggaacggaacgctcggcgtcgcgggccccgcccggaaagtttgccgtggagtcgcgacctcttggcccgcgcggcccggcatgaagcggcgttgaggagctgctgccgccgcttgccgctgccgccgccgccgcctgaggaggagctgcagcaccctgggccacgccg

SEQ ID NO: 817 - DNA, 430 bp, Artificial Sequence
  NFATc2 promoter sequence 1
cagagagaggctgcgttcagactggggcactgccatcccctccgcatcatggggtctgtggaccaaggtaactgactctcgatcccttccagccttttccgctcgctcctcccggccctttcctgctgctcccgtcccgggcagcactttcagctcccggcagaggtcggtgcgggaggcctggggaccccgctcgccctcggcgcacaggtagcggggcccgcggaggggcgcccgcgccccggccagggaagggacacttgggaaggcgactttggacaactttacgcgggggcagggaagtgtcccaggccgggattccctaggccagtctgtcgggaggattttcctctccacgggacaccgggagggattctcgctactaaccgctggctgtttaaccgtttcagcactcggcttttgacagcaa

SEQ ID NO: 818 - DNA, 64 bp, Artificial Sequence
  NFATc2 promoter sequence 2
catcatggggtctgtggaccaaggtaactgactctcgatcccttccagccttttccgctcgctc

SEQ ID NO: 819 - DNA, 12 bp, Artificial Sequence
  NFATc1 response element consensus
cattttttccat

SEQ ID NO: 820 - DNA, 8 bp, Artificial Sequence
  NFATc1 response element consensus
tttttcca

SEQ ID NO: 821 - DNA, 119 bp, Artificial Sequence
  NFAT response elements contained within the Foxp3 enhancer region
acttgaaaatgagataaatgttcacctatgttggcttctagtctcttttatggcttcattttttccatttactatagaggttaagagtgtgggtactggagccagactgtctgggacaa

SEQ ID NO: 822 - DNA, 1506 bp, Artificial Sequence
  muE6 IgD/CD8/41BB/CD3z
atggccctgcccgtgaccgctttgctgctccccctggcgctgctgctgcacgccgccaggccagaggtgaaggtggtggagtctgggggagacttagtgaagcctggagggtccctgaaactctcctgtgtagtctctggattcactttcagtagatatggcatgtcttgggttcgccagactccaggcaagaggctggagtgggtcgcaaccattagtggtggcggtacttacatctactatccagacagtgtgaaggggcgattcaccatctccagagacaatgccaagaacaccctgtacctgcaaatgagcagtctgaagtctgaggacacagccatgtatcactgtacaagggataactacggtaggaactacgactacggtatggactactggggtcaaggaacctcagtcaccgtctcctcaggcggtggcggatccggcggtggcggatccggcggtggcggatcccaaattgttctcacccagtctccagcaatcatgtctgcatctccaggggaggaggtcaccctaacctgcagtgccacctcaagtgtaagttacatacactggttccagcagaggccaggcacttctcccaaactctggatttatagcacatccaacctggcttctggagtccctgttcgcttcagtggcagtggatatgggacctcttactctctcacaatcagccgaatggaggctgaagatgctgccacttattactgccagcaaaggagtagttccccattcacgttcggctcggggacaaagttggaaataaaagagtctccaaaggcacaggcctcctcagtgcccactgcacaaccccaagcagagggcagcctcgccaaggcaaccacagccccagccaccacccgtaacacaggaagaggcggcgaagagaagaaaaaggagaaggagaaagaggaacaagaagagagagagacaaagacaccaatctacatttgggccccgctcgcaggcacatgtggagtgctcctcctctccctggtgattaccctgtactgcaaaaggggccgcaaaaaactcctttacatttttaagcagccttttatgaggccagtacagacgactcaagaggaagacgggtgctcatgccgctttcctgaggaggaggaaggagggtgcgaactgcgcgttaagttctcccgatcagccgacgcgcctgcttacaagcagggccagaaccaactgtacaacgagctgaatctcggtagacgggaagagtacgacgtgttggacaaacggagaggccgcgacccagaaatgggcggcaagcctcgcaggaaaaacccccaggagggactgtacaatgagttgcagaaagataagatggcagaagcttatagcgagatcggaatgaagggggaaaggagacgagggaaaggacacgacggcctttatcagggcctgtccacagcaacaaaagatacgtatgacgccctccatatgcaggcacttccaccacggtgataa

SEQ ID NO: 823 - protein, 500 aa, Artificial Sequence
  muE6 IgD/CD8/41BB/CD3z
MALPVTALLLPLALLLHAARPEVKVVESGGDLVKPGGSLKLSCVVSGFTFSRYGMSWVRQTPGKRLEWVATISGGGTYIYYPDSVKGRFTISRDNAKNTLYLQMSSLKSEDTAMYHCTRDNYGRNYDYGMDYWGQGTSVTVSSGGGGSGGGGSGGGGSQIVLTQSPAIMSASPGEEVTLTCSATSSVSYIHWFQQRPGTSPKLWIYSTSNLASGVPVRFSGSGYGTSYSLTISRMEAEDAATYYCQQRSSSPFTFGSGTKLEIKESPKAQASSVPTAQPQAEGSLAKATTAPATTRNTGRGGEEKKKEKEKEEQEERETKTPIYIWAPLAGTCGVLLLSLVITLYCKRGRKKLLYIFKQPFMRPVQTTQEEDGCSCRFPEEEEGGCELRVKFSRSADAPAYKQGQNQLYNELNLGRREEYDVLDKRRGRDPEMGGKPRRKNPQEGLYNELQKDKMAEAYSEIGMKGERRRGKGHDGLYQGLSTATKDTYDALHMQALPPR

SEQ ID NO: 824 - DNA, 1518 bp, Artificial Sequence
  muC2 IgD/CD8/41BB/CD3z
atggccctgcccgtgaccgctttgctgctccccctggcgctgctgctgcacgccgccaggccagaggtccagctggaggagtcagggggaggcttagtgaagcctggagggtccctgaaactctcctgtgcagcctctggattcactttcagtggctatgccatgtcttgggttcgccagactccggagaagaggctggagtgggtcgcaaccattagtagtggtggtacttatatctactatccagacagtgtgaaggggcgattcaccatctccagagacaatgccaagaacaccctgtacctgcaaatgagcagtctgaggtctgaggacacggccatgtattactgtgcaagacttgggggggataattactacgaatacttcgatgtctggggcgcagggaccacggtcaccgtctcctccggcggtggcggatccggcggtggcggatccggcggtggcggatccgacattgtgatcacacagtctacagcttccttaggtgtatctctggggcagagggccaccatctcatgcagggccagcaaaagtgtcagtacatctggctatagttatatgcactggtaccaacagagaccaggacagccacccaaactcctcatctatcttgcatccaacctagaatctggggtccctgccaggttcagtggcagtgggtctgggacagacttcaccctcaacatccatcctgtggaggaggaggatgctgcaacctattactgtcagcacagtagggagcttccgttcacgttcggaggggggaccaagctggagataaaagagtctccaaaggcacaggcctcctcagtgcccactgcacaaccccaagcagagggcagcctcgccaaggcaaccacagccccagccaccacccgtaacacaggaagaggcggcgaagagaagaaaaaggagaaggagaaagaggaacaagaagagagagagacaaagacaccaatctacatttgggccccgctcgcaggcacatgtggagtgctcctcctctccctggtgattaccctgtactgcaaaaggggccgcaaaaaactcctttacatttttaagcagccttttatgaggccagtacagacgactcaagaggaagacgggtgctcatgccgctttcctgaggaggaggaaggagggtgcgaactgcgcgttaagttctcccgatcagccgacgcgcctgcttacaagcagggccagaaccaactgtacaacgagctgaatctcggtagacgggaagagtacgacgtgttggacaaacggagaggccgcgacccagaaatgggcggcaagcctcgcaggaaaaacccccaggagggactgtacaatgagttgcagaaagataagatggcagaagcttatagcgagatcggaatgaagggggaaaggagacgagggaaaggacacgacggcctttatcagggcctgtccacagcaacaaaagatacgtatgacgccctccatatgcaggcacttccaccacggtgataa

SEQ ID NO: 825 - protein, 504 aa, Artificial Sequence
  muC2 IgD/CD8/41BB/CD3z
MALPVTALLLPLALLLHAARPEVQLEESGGGLVKPGGSLKLSCAASGFTFSGYAMSWVRQTPEKRLEWVATISSGGTYIYYPDSVKGRFTISRDNAKNTLYLQMSSLRSEDTAMYYCARLGGDNYYEYFDVWGAGTTVTVSSGGGGSGGGGSGGGGSDIVITQSTASLGVSLGQRATISCRASKSVSTSGYSYMHWYQQRPGQPPKLLIYLASNLESGVPARFSGSGSGTDFTLNIHPVEEEDAATYYCQHSRELPFTFGGGTKLEIKESPKAQASSVPTAQPQAEGSLAKATTAPATTRNTGRGGEEKKKEKEKEEQEERETKTPIYIWAPLAGTCGVLLLSLVITLYCKRGRKKLLYIFKQPFMRPVQTTQEEDGCSCRFPEEEEGGCELRVKFSRSADAPAYKQGQNQLYNELNLGRREEYDVLDKRRGRDPEMGGKPRRKNPQEGLYNELQKDKMAEAYSEIGMKGERRRGKGHDGLYQGLSTATKDTYDALHMQALPPR

SEQ ID NO: 826 - DNA, 1383 bp, Artificial Sequence
  muE6 CD28/CD28/CD28/CD3z
atggccctgcccgtgaccgctttgctgctccccctggcgctgctgctgcacgccgccaggccagaggtgaaggtggtggagtctgggggagacttagtgaagcctggagggtccctgaaactctcctgtgtagtctctggattcactttcagtagatatggcatgtcttgggttcgccagactccaggcaagaggctggagtgggtcgcaaccattagtggtggcggtacttacatctactatccagacagtgtgaaggggcgattcaccatctccagagacaatgccaagaacaccctgtacctgcaaatgagcagtctgaagtctgaggacacagccatgtatcactgtacaagggataactacggtaggaactacgactacggtatggactactggggtcaaggaacctcagtcaccgtctcctcaggcggtggcggatccggcggtggcggatccggcggtggcggatcccaaattgttctcacccagtctccagcaatcatgtctgcatctccaggggaggaggtcaccctaacctgcagtgccacctcaagtgtaagttacatacactggttccagcagaggccaggcacttctcccaaactctggatttatagcacatccaacctggcttctggagtccctgttcgcttcagtggcagtggatatgggacctcttactctctcacaatcagccgaatggaggctgaagatgctgccacttattactgccagcaaaggagtagttccccattcacgttcggctcggggacaaagttggaaataaaaaaacacctttgtccaagtcccctatttcccggaccttctaagcccttttgggtgctggtggtggttggtggagtcctggcttgctatagcttgctagtaacagtggcctttattattttctgggtgagaagcaagcggtctcggctcctgcattctgattacatgaacatgaccccaagaagaccaggccccaccaggaaacattaccagccctacgctccgccacgcgacttcgctgcctaccggtcccgcgttaagttctcccgatcagccgacgcgcctgcttacaagcagggccagaaccaactgtacaacgagctgaatctcggtagacgggaagagtacgacgtgttggacaaacggagaggccgcgacccagaaatgggcggcaagcctcgcaggaaaaacccccaggagggactgtacaatgagttgcagaaagataagatggcagaagcttatagcgagatcggaatgaagggggaaaggagacgagggaaaggacacgacggcctttatcagggcctgtccacagcaacaaaagatacgtatgacgccctccatatgcaggcacttccaccacggtgataa

SEQ ID NO: 827 - protein, 459 aa, Artificial Sequence
  muE6 CD28/CD28/CD28/CD3z
MALPVTALLLPLALLLHAARPEVKVVESGGDLVKPGGSLKLSCVVSGFTFSRYGMSWVRQTPGKRLEWVATISGGGTYIYYPDSVKGRFTISRDNAKNTLYLQMSSLKSEDTAMYHCTRDNYGRNYDYGMDYWGQGTSVTVSSGGGGSGGGGSGGGGSQIVLTQSPAIMSASPGEEVTLTCSATSSVSYIHWFQQRPGTSPKLWIYSTSNLASGVPVRFSGSGYGTSYSLTISRMEAEDAATYYCQQRSSSPFTFGSGTKLEIKKHLCPSPLFPGPSKPFWVLVVVGGVLACYSLLVTVAFIIFWVRSKRSRLLHSDYMNMTPRRPGPTRKHYQPYAPPRDFAAYRSRVKFSRSADAPAYKQGQNQLYNELNLGRREEYDVLDKRRGRDPEMGGKPRRKNPQEGLYNELQKDKMAEAYSEIGMKGERRRGKGHDGLYQGLSTATKDTYDALHMQALPPR

SEQ ID NO: 828 - DNA, 1395 bp, Artificial Sequence
  muC2 CD28/CD28/CD28/CD3z
atggccctgcccgtgaccgctttgctgctccccctggcgctgctgctgcacgccgccaggccagaggtccagctggaggagtcagggggaggcttagtgaagcctggagggtccctgaaactctcctgtgcagcctctggattcactttcagtggctatgccatgtcttgggttcgccagactccggagaagaggctggagtgggtcgcaaccattagtagtggtggtacttatatctactatccagacagtgtgaaggggcgattcaccatctccagagacaatgccaagaacaccctgtacctgcaaatgagcagtctgaggtctgaggacacggccatgtattactgtgcaagacttgggggggataattactacgaatacttcgatgtctggggcgcagggaccacggtcaccgtctcctccggcggtggcggatccggcggtggcggatccggcggtggcggatccgacattgtgatcacacagtctacagcttccttaggtgtatctctggggcagagggccaccatctcatgcagggccagcaaaagtgtcagtacatctggctatagttatatgcactggtaccaacagagaccaggacagccacccaaactcctcatctatcttgcatccaacctagaatctggggtccctgccaggttcagtggcagtgggtctgggacagacttcaccctcaacatccatcctgtggaggaggaggatgctgcaacctattactgtcagcacagtagggagcttccgttcacgttcggaggggggaccaagctggagataaaaaaacacctttgtccaagtcccctatttcccggaccttctaagcccttttgggtgctggtggtggttggtggagtcctggcttgctatagcttgctagtaacagtggcctttattattttctgggtgagaagcaagcggtctcggctcctgcattctgattacatgaacatgaccccaagaagaccaggccccaccaggaaacattaccagccctacgctccgccacgcgacttcgctgcctaccggtcccgcgttaagttctcccgatcagccgacgcgcctgcttacaagcagggccagaaccaactgtacaacgagctgaatctcggtagacgggaagagtacgacgtgttggacaaacggagaggccgcgacccagaaatgggcggcaagcctcgcaggaaaaacccccaggagggactgtacaatgagttgcagaaagataagatggcagaagcttatagcgagatcggaatgaagggggaaaggagacgagggaaaggacacgacggcctttatcagggcctgtccacagcaacaaaagatacgtatgacgccctccatatgcaggcacttccaccacggtgataa

SEQ ID NO: 829 - protein, 463 aa, Artificial Sequence
  muC2 CD28/CD28/CD28/CD3z
MALPVTALLLPLALLLHAARPEVQLEESGGGLVKPGGSLKLSCAASGFTFSGYAMSWVRQTPEKRLEWVATISSGGTYIYYPDSVKGRFTISRDNAKNTLYLQMSSLRSEDTAMYYCARLGGDNYYEYFDVWGAGTTVTVSSGGGGSGGGGSGGGGSDIVITQSTASLGVSLGQRATISCRASKSVSTSGYSYMHWYQQRPGQPPKLLIYLASNLESGVPARFSGSGSGTDFTLNIHPVEEEDAATYYCQHSRELPFTFGGGTKLEIKKHLCPSPLFPGPSKPFWVLVVVGGVLACYSLLVTVAFIIFWVRSKRSRLLHSDYMNMTPRRPGPTRKHYQPYAPPRDFAAYRSRVKFSRSADAPAYKQGQNQLYNELNLGRREEYDVLDKRRGRDPEMGGKPRRKNPQEGLYNELQKDKMAEAYSEIGMKGERRRGKGHDGLYQGLSTATKDTYDALHMQALPPR

SEQ ID NO: 830 - DNA, 1503 bp, Artificial Sequence
  CD19 IgD/CD8/41BB/CD3z
atggccctgcccgtgaccgctttgctgctccccctggcgctgctgctgcacgccgccaggccagacatacagatgacgcagacgaccagcagcctttccgcttccctgggcgaccgagtaaccattagttgtagagcatctcaggatatttctaagtatctgaattggtaccaacagaaacctgatggcactgtcaagctcttgatatatcacaccagtcgactccattcaggcgtcccttccagattcagtgggagtggcagcgggactgattactccctcactatctctaacctggaacaggaagacatcgctacatacttctgtcagcagggaaacactctcccctatacctttgggggaggaaccaagttggaaataacaggcggtggcggatccggcggtggcggatccggcggtggcggatccgaggtgaaactgcaggagtcaggacctggcctggtggcgccctcacagagcctgtccgtcacatgcactgtctcaggggtctcattacccgactatggtgtaagctggattcgccagcctccacgaaagggtctggagtggctgggagtaatatggggtagtgaaaccacatactataattcagctctcaaatccagactgaccatcatcaaggacaactccaagagccaagttttcttaaaaatgaacagtctgcaaactgatgacacagccatttactactgtgccaaacattattactacggtggtagctatgctatggactactggggccaaggaacctcagtcaccgtctcctcagagtctccaaaggcacaggcctcctcagtgcccactgcacaaccccaagcagagggcagcctcgccaaggcaaccacagccccagccaccacccgtaacacaggaagaggcggcgaagagaagaaaaaggagaaggagaaagaggaacaagaagagagagagacaaagacaccaatctacatttgggccccgctcgcaggcacatgtggagtgctcctcctctccctggtgattaccctgtactgcaaaaggggccgcaaaaaactcctttacatttttaagcagccttttatgaggccagtacagacgactcaagaggaagacgggtgctcatgccgctttcctgaggaggaggaaggagggtgcgaactgcgcgttaagttctcccgatcagccgacgcgcctgcttacaagcagggccagaaccaactgtacaacgagctgaatctcggtagacgggaagagtacgacgtgttggacaaacggagaggccgcgacccagaaatgggcggcaagcctcgcaggaaaaacccccaggagggactgtacaatgagttgcagaaagataagatggcagaagcttatagcgagatcggaatgaagggggaaaggagacgagggaaaggacacgacggcctttatcagggcctgtccacagcaacaaaagatacgtatgacgccctccatatgcaggcacttccaccacggtgataa

SEQ ID NO: 831 - protein, 499 aa, Artificial Sequence
  CD19 IgD/CD8/41BB/CD3z
MALPVTALLLPLALLLHAARPDIQMTQTTSSLSASLGDRVTISCRASQDISKYLNWYQQKPDGTVKLLIYHTSRLHSGVPSRFSGSGSGTDYSLTISNLEQEDIATYFCQQGNTLPYTFGGGTKLEITGGGGSGGGGSGGGGSEVKLQESGPGLVAPSQSLSVTCTVSGVSLPDYGVSWIRQPPRKGLEWLGVIWGSETTYYNSALKSRLTIIKDNSKSQVFLKMNSLQTDDTAIYYCAKHYYYGGSYAMDYWGQGTSVTVSSESPKAQASSVPTAQPQAEGSLAKATTAPATTRNTGRGGEEKKKEKEKEEQEERETKTPIYIWAPLAGTCGVLLLSLVITLYCKRGRKKLLYIFKQPFMRPVQTTQEEDGCSCRFPEEEEGGCELRVKFSRSADAPAYKQGQNQLYNELNLGRREEYDVLDKRRGRDPEMGGKPRRKNPQEGLYNELQKDKMAEAYSEIGMKGERRRGKGHDGLYQGLSTATKDTYDALHMQALPPR
